(19) United States
(12) Patent Application Publication
(10) Pub. No.: US 2026/0139236 A1
(43) Pub. Date: May 21, 2026

(54) REPROGRAMABLE TNPB POLYPEPTIDES AND USE THEREOF

(71) Applicants: The Broad Institute, Inc., Cambridge, MA (US); Massachusetts Institute of Technology, Cambridge, MA (US)

(72) Inventors: Feng Zhang, Cambridge, MA (US); Han Altae-Tran, Cambridge, MA (US); Soumya Kannan, Cambridge, MA (US)

(21) Appl. No.: 19/120,257

(22) PCT Filed: Oct. 11, 2023
(86) PCT No.: PCT/US2023/076568

§ 371 Date: Apr. 11, 2025

Related U.S. Application Data
(60) Provisional application No. 63/415,131, filed on Oct. 11, 2022.

(51) Int. Cl. C12N 9/22; C12N 15/11

(52) U.S. Cl. CPC C12N 9/22; C12N 15/111

(57) ABSTRACT

Systems, methods and composition for targeting polynucleotides are detailed herein. In particular, engineered DNA-targeting systems comprising novel TnpB polypeptides and a reprogrammable targeting nucleic acid component and methods and application of use are provided.

### CROSS-REFERENCE TO RELATED APPLICATIONS

[0001] This application claims the benefit of U.S. Provisional Application No. 63/415,131, filed Oct. 11, 2022. The entire contents of the above-identified applications are hereby fully incorporated herein by reference.

### STATEMENT AS TO FEDERALLY SPONSORED RESEARCH

[0002] This invention was made with government support under Grant Nos. HL141201 and HG009761 awarded by The National Institutes of Health. The government has certain rights in the invention.

### REFERENCE TO AN ELECTRONIC SEQUENCE LISTING

[0003] The contents of the electronic sequence listing (“BROD-5685WP_ST26.xml”; Size is 4,008,861 bytes and it was created on Oct. 11, 2023) is herein incorporated by reference in its entirety.

### TECHNICAL FIELD

[0004] The subject matter disclosed herein is generally directed to systems, methods and compositions used for targeted gene modification and nucleic acid editing utilizing systems comprising TnpB polypeptides.

### BACKGROUND

[0005] While there are genome-editing techniques available for producing targeted genome perturbations, there remains a need for new genome engineering technologies that employ novel strategies and molecular mechanisms and are affordable, easy to set up, scalable, and amenable to targeting multiple positions within the genome. Additional desirable tools in genome engineering and biotechnology would further advance the art.

[0006] Citation or identification of any document in this application is not an admission that such a document is available as prior art to the present invention.

### SUMMARY

[0007] In one aspect, the present disclosure provides a composition comprising a TnpB polypeptide having one or more catalytic rearrangements relative to a reference TnpB polypeptide and an engineered nucleic acid component comprising a scaffold and a reprogrammable spacer sequence, the nucleic acid component capable of forming a complex with the TnpB and directing sequence-specific binding of the complex to a target polynucleotide.

[0008] In example embodiments, wherein the TnpB polypeptide functions as transposase, a RNase, an integrase, a recombinase, a polymerase, a reverse transcriptase, or a nuclease. In example embodiments, wherein the TnpB polypeptide is catalytically inactive. In example embodiments, further comprises a functional domain associated with the TnpB polypeptide. In example embodiments, wherein the functional domain is a transposase, an integrase, a nucleobase deaminase, a reverse transcriptase, a recombiniase, an integrase, a topoisomerase, a retrotransposon, a phosphatase, a polymerase, a ligase, a helitron, a helicase, a methylase, a demethylase, a translation activator, a translation repressor, a transcription activator, a transcription repressor, a transcription release factor, a chromatin modifier, a histone modifier, or a nuclease.

[0009] In example embodiments, the one or more catalytic rearrangements are in the RuvC domain. In example embodiments, the catalytic rearrangement is in a RuvC-I subdomain, a RuvC-II subdomain, a RuvC-III subdomain. In example embodiments, the TnpB has a catalytic rearrangement at the first, second, or third residue of a DED motif, or a combination thereof. In example embodiments, the TnpB polypeptide has a polypeptide sequence selected from those in the Sequence listing. In example embodiments, the TnpB polypeptide is selected from SEQ ID NO: 1-7, 19-22. 138-140, 148-153, 259-267, 297-299, 300-314, 1484-1489, 1515-1520, 2041-2047, 2051-2057, and 2293-2309 (dead). In example embodiments, the TnpB polypeptide is selected from SEQ ID NO: 12-154, 1664-1668 (RuvC2+3).

[0010] In example embodiments, the TnpB polypeptide is selected from SEQ ID NO: 37-139, 154-200, 281-286, 294-296, 325-483, 1509-1514, 2142-2145, 2158-2196, 2225-2233, and 2240-2244 (RuvC2). In example embodiments, the TnpB polypeptide is selected from SEQ ID NO: 221=253 and 1542-1571 (Ruv C2/3). In example embodiments, the TnpB polypeptide is selected from SEQ ID NO: 254-258 (RuvC1+2_. In example embodiments, the TnpB polypeptide is selected from SEQ ID NO: 268-276, 2048-2050, 2090-2121, 2123-2127 (RuvC1). In example embodiments, the TnpB polypeptide is selected from SEQ ID NO: 277-280 (Ruv C1/2). In example embodiments, the TnpB polypeptide is selected from SEQ ID NO: 297-293 (RuvC1+2/3). In example embodiments, the TnpB polypeptide is selected from SEQ ID NO: 2197-2224 (SpoIIE). In example embodiments, the composition further comprises a homologous recombination donor template comprising a donor sequence for insertion into a target polynucleotide.

[0011] These and other aspects, objects, features, and advantages of the example embodiments will become apparent to those having ordinary skill in the art upon consideration of the following detailed description of example embodiments.

### BRIEF DESCRIPTION OF THE DRAWINGS

[0012] An understanding of the features and advantages of the present invention will be obtained by reference to the following detailed description that sets forth illustrative embodiments, in which the principles of the invention may be utilized, and the accompanying drawings of which:

[0013] FIG. 1—example catalytic rearrangement of example TnpB polypeptides.

[0014] FIG. 2—shows how catalytic rearrangement within the RNAseH family of proteins can lead to structurally and functionally diverse catalytic centers.

[0015] The figures herein are for illustrative purposes only and are not necessarily drawn to scale.

### DETAILED DESCRIPTION OF THE EXAMPLE EMBODIMENTS

### General Definitions

[0016] Unless defined otherwise, technical and scientific terms used herein have the same meaning as commonly understood by one of ordinary skill in the art to which this disclosure pertains. Definitions of common terms and techniques in molecular biology may be found in Molecular Cloning: A Laboratory Manual, 2^{nd} edition (1989) (Sambrook, Fritsch, and Maniatis); Molecular Cloning: A Laboratory Manual, 4^{th} edition (2012) (Green and Sambrook); Current Protocols in Molecular Biology (1987) (F. M. Ausubel et al. eds.); the series Methods in Enzymology (Academic Press, Inc.): PCR 2: A Practical Approach (1995) (M. J. MacPherson, B. D. Hames, and G. R. Taylor eds.): Antibodies, A Laboratory Manual (1988) (Harlow and Lane, eds.): Antibodies A Laboratory Manual, 2^{nd} edition 2013 (E. A. Greenfield ed.); Animal Cell Culture (1987) (R. I. Freshney, ed.); Benjamin Lewin, Genes IX, published by Jones and Bartlet, 2008 (ISBN 0763752223); Kendrew et al. (eds.), The Encyclopedia of Molecular Biology, published by Blackwell Science Ltd., 1994 (ISBN 0632021829); Robert A. Meyers (ed.), Molecular Biology and Biotechnology: a Comprehensive Desk Reference, published by VCH Publishers, Inc., 1995 (ISBN 9780471185710); Singleton et al., Dictionary of Microbiology and Molecular Biology 2nd ed., J. Wiley & Sons (New York, N.Y. 1994), March, Advanced Organic Chemistry Reactions, Mechanisms and Structure 4th ed., John Wiley & Sons (New York, N.Y. 1992); and Marten H. Hofker and Jan van Deursen, Transgenic Mouse Methods and Protocols, 2^{nd} edition (2011).

[0017] As used herein, the singular forms “a”, “an”, and “the” include both singular and plural referents unless the context clearly dictates otherwise.

[0018] The term “optional” or “optionally” means that the subsequent described event, circumstance or substituent may or may not occur, and that the description includes instances where the event or circumstance occurs and instances where it does not.

[0019] The recitation of numerical ranges by endpoints includes all numbers and fractions subsumed within the respective ranges, as well as the recited endpoints.

[0020] The terms “about” or “approximately” as used herein when referring to a measurable value such as a parameter, an amount, a temporal duration, and the like, are meant to encompass variations of and from the specified value, such as variations of +/−10% or less, +/−5% or less, +/−1% or less, and +/−0.1% or less of and from the specified value, insofar such variations are appropriate to perform in the disclosed invention. It is to be understood that the value to which the modifier “about” or “approximately” refers is itself also specifically, and preferably, disclosed.

[0021] As used herein, a “biological sample” may contain whole cells and/or live cells and/or cell debris. The biological sample may contain (or be derived from) a “bodily fluid”. The present invention encompasses embodiments wherein the bodily fluid is selected from amniotic fluid, aqueous humour, vitreous humour, bile, blood serum, breast milk, cerebrospinal fluid, cerumen (earwax), chyle, chyme, endolymph, perilymph, exudates, feces, female ejaculate, gastric acid, gastric juice, lymph, mucus (including nasal drainage and phlegm), pericardial fluid, peritoneal fluid, pleural fluid, pus, rheum, saliva, sebum (skin oil), semen, sputum, synovial fluid, sweat, tears, urine, vaginal secretion, vomit and mixtures of one or more thereof. Biological samples include cell cultures, bodily fluids, cell cultures from bodily fluids. Bodily fluids may be obtained from a mammal organism, for example by puncture, or other collecting or sampling procedures.

[0022] The terms “subject,” “individual,” and “patient” are used interchangeably herein to refer to a vertebrate, preferably a mammal, more preferably a human. Mammals include, but are not limited to, murines, simians, humans, farm animals, sport animals, and pets. Tissues, cells and their progeny of a biological entity obtained in vivo or cultured in vitro are also encompassed.

[0023] Various embodiments are described hereinafter. It should be noted that the specific embodiments are not intended as an exhaustive description or as a limitation to the broader aspects discussed herein. One aspect described in conjunction with a particular embodiment is not necessarily limited to that embodiment and can be practiced with any other embodiment(s). Reference throughout this specification to “one embodiment”, “an embodiment,” “an example embodiment,” means that a particular feature, structure, or characteristic described in connection with the embodiment is included in at least one embodiment of the present invention. Thus, appearances of the phrases “in one embodiment,” “in an embodiment,” or “an example embodiment” in various places throughout this specification are not necessarily all referring to the same embodiment but may. Furthermore, the particular features, structures or characteristics may be combined in any suitable manner, as would be apparent to a person skilled in the art from this disclosure, in one or more embodiments. Furthermore, while some embodiments described herein include some but not other features included in other embodiments, combinations of features of different embodiments are meant to be within the scope of the invention. For example, in the appended claims, any of the claimed embodiments can be used in any combination.

[0024] All publications, published patent documents, and patent applications cited herein are hereby incorporated by reference to the same extent as though each individual publication, published patent document, or patent application was specifically and individually indicated as being incorporated by reference.

### Overview

[0025] Embodiments disclosed herein provide engineered TnpB systems. The TnpB system comprises a TnpB polypeptide and a nucleic acid component capable of forming a complex with the TnpB polypeptide and directing the complex to a target polynucleotide. The TnpB systems and TnpB/nucleic acid component complexes may also be referred to herein as OMEGA (Obligate Mobile Element Guided Activity) systems or complexes, or Ω sytems or complexes for short. TnpB systems are a distinct type of Ω sytem, which further include IscB, IsrB, and IshB systems. The nucleic acid component of Ω sytems is structurally distinct from other RNA-guided nucleases, such as CRISPR-Cas systems, and may also be refered to as a ωRNA. In one example embodiment, the TnpB systems are RNA-predominate, that is the nucleic acid component makes a larger contribution to the overall size of the TnpB complex relative to other RNA-guided nuclease systems such as CRISPR-Cas. Also, given the more minimal structural features of TnpB relative other known programmable nucleases such as CRISPR-Cas, the polynucleotide binding pocket is open and more accessible, which can facilitate greater access to and ability to manipulate, modify, edit, remove, or delete nucleotides at a target region on the bound polynucleotide. Disclosed herein are TnpB systems that may function as nuclease, nickases, or catalytically inactive polynucleotide binding proteins that can be coupled with other functional domains.

[0026] In on example embodiment, the TnpB systems disclosed herein have one or more catalytic rearrangement relative to a reference TnpB system. In on example embodiment, the catalytic rearrangement results in a TnpB system that is naturally catalytically inactive as opposed to a naturally occurring system that is catalytically inactive but mutated to render the TnpB polypeptide catalytically inactive. In other example embodiment, the catalytic rearrangements results in improved nuclease function, or new enzymatic functions. In one example embodiment, the TnpB with the catalytic rearrangement functions as transpoase, a RNase, an integrase, a recombinase, a polymerase, a reverse transcriptase, or a nuclease.

[0027] In one embodiment, the TnpB systems and related compositions may specifically target single-strand or double-strand DNA. In one embodiment, the TnpB system may bind and cleave double-strand DNA. In one embodiment, the TnpB system may bind to double-stranded DNA without introducing a break to either of the strands. In one embodiment, the TnpB polypeptides or nuclease/nucleic acid component complexes may open, disrupting the continuity of one of the two DNA strands, thereby introducing a nick of the double stranded DNA. In an embodiment, and without being bound by theory, the size and configuration of the TnpB systems allows exposure to the non-targeting strand, which may be in single-stranded form, to allow for for the ability to modify, edit, delete or insert polynucleotides on the non-target strand. In an embodiment, this accessibility further allows for enhanced editing outcomes on the target and/or non-target strand, e.g., increased specificity, enhanced editing efficiency.

[0028] In another aspect, embodiments disclosed herein include applications of the compositions herein, including therapeutic and diagnostic compositions and uses. Delivery of the proteins and systems disclosed is also provided, including to a variety of cells and via a variety of delivery vehicles.

### TNPB Compositions

[0029] In one aspect, embodiments disclosed herein are directed to compositions comprising a TnpB and a ωRNA capable of forming a complex with the TnpB and directing site-specific binding of the TnpB to a target sequence on a target polynucleotide.

### TnpB Polypeptides

[0030] TnpB polypeptides of the present invention may comprise a Ruv-C-like domain. Exemplary TnpB sequences are shown in FIG. 1, and the Sequence Listing. The RuvC domain may be a split RuvC domain comprising RuvC-I, RuvC-II, and RuvC-III subdomains. The TnpB may further comprise one or more of a HTH domain, a bridge helix domain and a zinc finger domain. In one example embodiment TnpB polypeptides do not comprise an HNH domain. In one example embodiment, TnpB proteins comprise, starting at the N-terminus a HTH domain, a RuvC-I sub-domain, a bridge helix domain, a RuvC-II sub-domain, a zinger finger domain, and a RuvC-III sub-domain. In one example embodiment, the RuvC-III sub-domain forms the C-terminus of the TnpB polypeptide.

[0031] In an example embodiment, the TnpB polypeptides are between 175 and 800 amino acids in size, between 200 and 790 amino acids in size, between 200 and 780 amino acids in size, between 200 and 770 amino acids in size, between 200 and 760 amino acids in size, between 200 and 750 amino acids in size, between 200 and 740 amino acids in size, between 200 and 730 amino acids in size, between 200 and 720 amino acids in size, between 200 and 720 amino acids in size, between 200 and 710 amino acids in size, between 200 and 700 amino acids in size, between 200 and 690 amino acids in size, between 200 and 680 amino acids in size, between 200 and 670 amino acids in size, between 200 and 660 amino acids in size, between 200 and 650 amino acids in size, between 200 and 640 amino acids in size, between 200 and 630 amino acids in size, between 200 and 620 amino acids in size, between 200 and 610 amino acids in size, between 200 and 600 amino acids in size, between 200 and 590 amino acids in size, between 200 and 580 amino acids in size, between 200 and 570 amino acids in size, between 200 and 560 amino acid, between 200 between 550 amino acids, between 200 and 540 amino acids, between 200 and 530 amino acids, between 200 and 520 amino acids, between 200 and 510 amino acids, between 200 and 500 amino acids, between 200 and 490 amino acids, between 200 and 480 amino acids, between 200 and 470 amino acids, between 200 and 460 amino acids, between 200 and 450 amino acids, between 200 and 440 amino acids, between 200 and 430 amino acids, between 200 and 420 amino acids, between 200 and 410 amino acids, between 210 and 500 amino acids, between 220 and 500 amino acids. Between 230 and 500 amino acids, between 240 and 500 amino acids, between 250 and 500 amino acids, between 260 and 500 amino acids, between 270 and 500 amino acids, between 280 and 500 amino acids, between 290 and 500 amino acids, between 300 and 500 amino acids, between 250 and 490 amino acids, between 250 and 480 amino acids, between 250 and 490 amino acids, or between 250 and 600 amino acids. In one embodiment, the TnpB polypeptide is between 300 and 500 amino acids, or between 350 and 450 amino acids.

[0032] In one embodiment, the TnpB polypeptides may comprise a modified naturally occurring protein, functional fragment or truncated version thereof, or a non-naturally occurring protein. In one embodiment, the TnpB polypeptide comprises one or more domains originating from other TnpB polypeptides, more particularly originating from different organisms. In one embodiment, the TnpB polypeptides may be designed by in silico approaches. Examples of in silico protein design have been described in the art and are therefore known to a skilled person.

[0033] In one embodiment, the TnpB polypeptide is from Epsilonproteobacteria bacterium, or Actinoplanes lobatus strain DSM 43150, Actinomadura celluolosilytica strain DSM 45823, Actinomadura namibiensis strain DSM 44197, Alicyclobacillus macrosprangiidus strain DSM 17980, Lipingzhangella halophila strain DSM 102030, or Ktedonobacter recemifer. In one embodiment, the TnpB polypeptide is from Ktedonobacter racemifer, or comprises a conserved RNA region with similarity to the 5′ ITR of K. racemifer TnpB loci. See, e.g., FIG. 2. In an aspect, the TnpB polypeptide encodes 5′ ITR/RNA (with RNA on the 3′ strand), TnpB (3′ strand), and lastly 3′ ITR. In one example embodiment, the TnpB may comprise a Fanzor protein, TnpB homologs, found in eukaryotic genomes.

[0034] In one example embodiment, the TnpB polypeptide may have one or more catalytic rearrangements relative to a reference TnpB selected from the group consisting of Epsilonproteobacteria bacterium, or Actinoplanes lobatus strain DSM 43150, Actinomadura celluolosilytica strain DSM 45823, Actinomadura namibiensis strain DSM 44197, Alicyclobacillus macrosprangiidus strain DSM 17980, Lipingzhangella halophila strain DSM 102030, or Ktedonobacter recemifer. In one embodiment, the TnpB polypeptide is from Ktedonobacter racemifer.

[0035] The TnpB polypeptides also encompasses homologs or orthologs of TnpB polypeptides whose sequences are specifically described herein. The terms “ortholog” and “homolog” are well known in the art. By means of further guidance, a “homolog” of a protein as used herein is a protein of the same species which performs the same or a similar function as the protein it is a homolog of. Homologous proteins may but need not be structurally related or are only partially structurally related. An “ortholog” of a protein as used herein is a protein of a different species which performs the same or a similar function as the protein it is an orthologue of. Orthologous proteins may be, but may not always be, structurally related or are only partially structurally related. In particular embodiments, the homolog or ortholog of a TnpB polypeptide such as referred to herein has a sequence homology or identity of at least 80%, at least 81%, at least 82%, at least 83%, at least 84% at least 85%, at least 86%, at least 87%, at least 88%, at least 89%, at least 90%, at least 91%, at least 92%, at least 93%, at least 94%, at least 95%, at least 96%, at least 97%, at least 98%, or at least 99% with a TnpB polypeptide, more specifically with a TnpB sequence identified in Table 1. In particular embodiments, a homolog or ortholog is identified according to its domain structure and/or function. In embodiments, the homolog or ortholog comprises catalytic residues and/or domains as defined herein, including as identified in FIG. 1. Sequence alignments conducted as described herein, as well as folding studies and domain predictions as taught herein can aid in the identification of a homolog or ortholog with the structural and functional characteristics identifying TnpB polypeptides, particularly those with conserved residues, including catalytic residues, and domains of TnpB polypeptides.

[0036] In one embodiment, the TnpB loci comprises inverted terminal repeats (ITRs). An inverted terminal repeat may be present on the 5′ or 3′ end of the TnpB sequence. In an aspect, the inverted terminal repeat may comprise between about 20 to about 40 nucleotides, for example, about 20, 21, 22, 23, 24, 25, 26, 27, 28, 29, 30, 31, 32, 33, 34, 35, 36, 37, 38, 39, or 40 nucleotides. In embodiments, the ITR comprises about 25 to 35 nucleotides, about 28 to 32 nucleotides. In an aspect, the ITR shares similarity with one or more inverted terminal repeats with sequences encoding IscB polypeptides. In one embodiment, the 5′ ITR or 3′ITR of TnpB has a sequence homology or identity of at least 80%, at least 85%, at least 90%, at least 95%, at least 96%, at least 97% at least 98% or at least 99% identity with an IscB 5′ ITR or 3′ ITR. In an embodiment, the 5′ ITR of the TnpB is homologous to the 5′ ITR of the IscB. Exemplary IscB ITRs are disclosed in Altae-Tran et al., Science 9 Sep. 2021, 374:6563, pp. 57-65; doi:10.1126/science.abj685, specifically incorporated herein by reference in its entirety, including supplementary materials Data S1 to S4 and Tables S1 to S6.

[0037] In one embodiment, the TnpB loci comprises a region of high conservation beyond the sequence encoding the polypeptide that indicates the presence of RNA at the 5′ end of the TnpB loci. In an aspect, the region upstream of the 5′ ITR of TnpB comprises a region encoding an RNA species that comprises a guide sequence.

[0038] A chimeric enzyme can comprise a first fragment and a second fragment, and the fragments can be of TnpB polypeptide orthologs of organisms of a genus or of a species, e.g., the fragments are from TnpB polypeptide orthologs of different species.

### RuvC Domain

[0039] In one embodiment, the TnpB polypeptide comprises at least at least one RuvC-like nuclease domain. The RuvC domain may comprise conserved catalytic amino acids indicative of the RuvC catalytic residue. In an example embodiment, the RuvC catalytic residue may be referenced relative to 186D, 270E or 354D of TnpB polypeptide 488601079 of Table 1B; to 172D, 254E, or 337D of TnpB polypeptide 297565028 of Table 1B; or to 179D, 268E, or 351D of TnpB polypeptide 257060308 of Table 1B. The catalytic residue may be referenced relative to 195D, 277E, or 361D of the sequence alignment in FIG. 1. In an aspect, the RuvC domain may comprise multiple subdomains, e.g., RuvC-I, RuvC-II and RuvC-III. The subdomains may be separated by intervening amino acid sequence of the protein.

[0040] In one embodiment, examples of the RuvC domain include any polypeptides a structural similarity and/or sequence similarity to a RuvC domain described in the art. In some examples, the RuvC domain may have an amino acid sequence that share at least 50%, at least 55%, at least 60%, at least 65%, at least 70%, at least 75%, at least 80%, at least 85%, at least 90%, at least 95%, at least 99%, or 100% sequence identity with RuvC domains known in the art.

[0041] In some examples, the RuvC domain comprise RuvC-I sub-domain, RuvC-II sub-domain, and RuvC-III sub-domain. Examples of the RuvC-I sub-domain also include any polypeptides having structural similarity and/or sequence similarity to a RuvC-I domain described in the art. For example, the RuvC-I domain may share a structural similarity and/or sequence similarity to a RuvC-I found in bacterial or archaeal species. In some examples, the RuvC domain may have an amino acid sequence that share at least 50%, at least 55%, at least 60%, at least 5%, at least 70%, at least 75%, at least 80%, at least 85%, at least 90%, at least 95%, at least 99%, or 100% sequence identity with RuvC-I domain. The RuvC-II domain also include any polypeptides a structural similarity and/or sequence similarity to a RuvC-II domain described in the art. In some examples, the RuvC domain may have an amino acid sequence that share at least 50%, at least 55%, at least 60%, at least 5%, at least 70%, at least 75%, at least 80%, at least 85%, at least 90%, at least 95%, at least 99%, or 100% sequence identity with RuvC-II domains. The RuvC-III domain also include any polypeptides a structural similarity and/or sequence similarity to a RuvC-III domain described in the art. In some examples, the RuvC domain may have an amino acid sequence that share at least 50%, at least 55%, at least 60%, at least 5%, at least 70%, at least 75%, at least 80%, at least 85%, at least 90%, at least 95%, at least 99%, or 100% sequence identity with RuvC-III domains.

[0042] For example, and as described in the art (e.g., Crystal structure of Cas9 in complex with nucleic acid component molecule and target DNA, Nishimasu et al. Cell, 2014) a RuvC may consist of a six-stranded mixed β-sheet (β1, β2, β5, β11, β14 and β17) flanked by α-helices (α33, α34 and α39-α45) and two additional two-stranded antiparallel β-sheets (β3/β4 and β15/β16). It has been described that some RuvC domains shares structural similarity with the retroviral integrase superfamily members characterized by an RNase H fold, such as Escherichia coli RuvC (PDB code 1HJR, 14% identity, root-mean-square deviation (rmsd) of 3.6 Å for 126 equivalent Cα atoms) and Thermus thermophilus RuvC (PDB code 4LD0, 12% identity, rmsd of 3.4 Å for 131 equivalent Cα atoms). E. coli RuvC is a 3-layer alpha-beta sandwich containing a 5-stranded beta-sheet sandwiched between 5 alpha-helices. RuvC nucleases have four catalytic residues (e.g., Asp7, Glu70, His 143 and Asp146 in T. thermophilus RuvC), and cleave Holliday junctions (or structurally analogous cruciform junctions) through a two-metal mechanism. Asp10 (Ala), Glu762, His983 and Asp986 of the Cas9 RuvC domain are located at positions similar to those of the catalytic residues of T. thermophilus RuvC. The RuvC-like domain of the TnpB polypeptides may comprise 1, 2, 3 or 4 of the catalytic residues.

[0043] In embodiments, the TnpB polypeptide is a nuclease. In one embodiment, the TnpB and nucleic acid component can direct sequence-specific nuclease activity. The cleavage may result in a 5′ overhang. The cleavage may occur distal to a target-adjacent motif (TAM) and may occur at the site of the spacer (guide) annealing site or 3′ of the target sequence. In an aspect, the TnpB cleaves at multiple positions within and beyond the nucleic acid component annealing site. In an aspect, DNA cleavage occurs 15, 16, 17, 18, 19, 20, 21, 22, 23, 24, 25 or more base pairs distal to the TAM and results in a 5′ overhang.

[0044] In an embodiment, the TnpB polypeptide is active, i.e., possesses nuclease activity, over a temperature range of from about 37° C. to about 80° C. In an embodiment, the TnpB polypeptide is active from about 37° C. to about 75° C., from about 37° C. to about 70° C., from about 37° C. to about 65° C., from about 37° C. to about 60° C., from about 37° C. to about 55° C., from about 37° C. to about 50° C., from about 37° C. to about 45° C. In an example embodiment, the TnpB polypeptide is active in the range of 37° C. to 65° C. In an example embodiment, the TnpB polypeptide is active in the range of 45° C. to 65° C. In an example embodiment, the TnpB polypeptide is active in the range of 45° C. to 60° C. In a further example embodiment, the TnpB polypeptide is the TnpB protein selected from Actinomadura cellulosilytica strain DSM 45823, Actinomadura namibiensis strain DSM 44197, Actinoplanus lobatus strain DSM 43150 (TnpB-1 and TnpB-2), Lipingzhangella halophila strain DSM 102030, Ktedonobacter racemifer, and Epsilonproteobacteria bacterium QNF01000004_Extraction_(reversed). In another example embodiment, the TnpB polypeptide is from Alicyclobacillus macrosporangiidus strain DSM 17980. In an example embodiment, the Alicyclobacillus macrosporangiidus strain DSM 17980 TnpB protein is most active in the range of 45° C. to 60° C.

[0045] In one embodiment, the TnpB polypeptide displays collateral activity, also referred to as trans cleavage, where upon activation and cleavage of its cognate target, non-specific cleave of non-cognate nucleic acid occurs. In an aspect, the TnpB polypeptide possesses collateral activity once triggered by target recognition. In an aspect, upon binding to the target sequence, the TnpB polypeptide will non-specifically cleave polynucleotide sequences, e.g., DNA. The target-activated nonspecific nuclease activity of TnpB is also referred to herein as collateral activity.

[0046] In an embodiment, the TnpB protein displays nuclease activity towards both ssDNA and dsDNA target sequences. In an embodiment, the TnpB protein displays nuclease activity towards both ssDNA and dsDNA wherein a TAM may not be necessary to cut a ssDNA target.

[0047] In embodiments, the TnpB polypeptide is a nuclease. In one embodiment, the TnpB and nucleic acid component molecule can direct sequence-specific nuclease activity. The TnpB polypeptides provided herein may also exhibit RNA-guided recombinase activity. The homology to the RuvC domain and relatedness to the DDE family of recombinases indicate potential recombinase activity. In an embodiment some TnpB polypeptides detailed herein may naturally exhibit, or be engineered to exhibit, a lack of nuclease activity, or reduced nuclease activity, and are provided with a functional domain as detailed herein, for example, nucleotide deaminases, reverse transcriptases, transposable elements, e.g., transposase, integrase, recombinase, allowing for RNA-guided target specific modifications.

[0048] In on example embodiment, the one or more catalytic rearrangements are in the RuvC domain. In one example embodiment, the one or more catalytic rearrangements are in the RuvC-1, RuvC-II, or RuvC-III domain. In one example embodiment, the one or more catalytic rearrangements are in the first, second, or third residue of a DED motif, or a combination thereof. In one example embodiment, the rearrangement is in the first residue of the DED motif. In one example embodiment, the rearrangement is in the first and second residue of the DED motif. In on example embodiment, the rearrangement is in the first and third residue of the DED motif. In one example embodiment, the the rearrangement ins in the second and third residue of the DED motif. In one example embodiment, the rearrangement is in the third residue of the DED motif. In one example embodiment, the catalytic rearrangements are those shown in SEQ ID NO: 2197-2224 (SpollE).

### Example TnpB Polypeptides

[0049] In certain example embodiments, the TnpB protein may comprise a sequence as set forth in the Sequence Listing.

TABLE 1
Reference TnpB Sequences

| TnpB | |
|---|---|
| Reference | TnpB Sequence |
| 488601079 | MLISYRFRIYPSKTVQAKLNEQLELCRWLY |
| | NRLLSEVNKARKEGRRIRREDTQSLIVRIK |
| | REEKPELSKVYSKVLQMVNYQLRSNISSLN |
| | ELRKKGVKVGWLRYKTSPNSFKTLNFNQSG |
| | FKIDFDRKKLSLSKVGDIPIRLHRSIGGKI |
| | KGVIIKRTKSGKWYAIVQAEVDKQPLPPTG |
| | RAIGIDVGITHFCVDSDGNYFEHPKYLDRT |
| | LEKIKKVQKQLSRKQKGSKNREKVRIGLAK |
| | LYEKLENQRNDFLHKLSRYYVNNYDIMVVE |
| | DLNVKEMAENGSSTTLNRHITDSAWSKFVR |
| | LLCEKAERAARTVVKVNPKNTSKRCAMCGY |
| | IVNNLKLHDRTFTCPICGWEADRDYNASLN |
| | ILDVGMGRSRTPVEGEPLPCVISYREVIAG |
| | QVLSMKQEVPSVRAE |
| | (SEQ ID NO: 2310) |
| 297565028 | MSLLSVKCKLIPDASTAEKLSRTVNQFANA |
| | CNYALQVARRDNIWNKFALQRAVYADLRAE |
| | YGLSANLAIRAIARVGKRKGHKAGGFKATS |
| | VDYDQRILSVNVDTETVSLSTVDGRVKVPM |
| | RIAGYQRHLLRTAKSIQGGQLVRGRDSSWY |
| | IHLWCEYDDPPVLDPQGMLGVDLGIVNIAT |
| | DSDGETYSGKHLNSVRHRHRRLRKKLQKKG |
| | TKGAKRRLKKLSGKETRFSNHVNHTLSKRI |
| | VAKAQRTERALALEDLQGIRERVRLRRPQR |
| | ATLHSWAFFDLGQKLRYKAERAGVPLVFVD |
| | PRNTSRQCPACGHAERANRPTQALFRCVAC |
| | GYSGAADYVAAVNIAVRGWAAVNRPYLGEA |
| | SRVSLHGSVPGSPRL |
| | (SEQ ID NO: 2311) |
| 257060308 | MLESQPITVACKLQVANTLAKEIDETMMVF |
| | ACACDWVNQNTPEKMINKTAMQSLVYQDVR |
| | VNFGLSSNLAIQAIRRVCANRKTAKQKGKK |
| | VKEFKPTSISYDARIFSFRESDWTVSVKLL |
| | NSRQRIKLLIGNYQIGLLKSKNPTSATLVK |
| | RKSGNYYIHITLDEPTQPEAKTDKVLGVDL |
| | GRTDIATTSEGESWSGKQITAKRNHYAKLR |
| | TTIQKKASKGTRSSRRRCRQLLARLSGKER |
| | RFQKHINHEISRQLVNNAVTNKQAIAIEDL |
| | TGIRERTNRKPRSKKDKRLGNNWAFYQLRQ |
| | FLTYKCILAGVKLILVNPAYTSLSCHKCLV |
| | IGDRKGKGFSCNNCGNKCDADYNGAQNIKA |
| | LGAIINRPGGSGLSCKLKTNVQYIQLSLFE |
| | GLGLLKTSTSA |
| | (SEQ ID NO: 2312) |

[0050] The TnpB polypeptide may comprise one or more modifications. As used herein, the term “modified” with regard to a TnpB polypeptide generally refers to a TnpB polypeptide having one or more modifications or mutations (including point mutations, truncations, insertions, deletions, chimeras, fusion proteins, etc.) compared to the wildtype counterpart from which it is derived. By derived is meant that the derived enzyme is largely based, in the sense of having a high degree of sequence or structural homology with, a wildtype enzyme, but that it has been mutated (modified) in some way as known in the art or as described herein.

[0051] The modified proteins, e.g., modified TnpB polypeptide may be catalytically inactive (also referred as dead). As used herein, a catalytically inactive or dead nuclease may have reduced, or no nuclease activity compared to a wildtype counterpart nuclease. In some cases, a catalytically inactive or dead nuclease may have nickase activity. In some cases, a catalytically inactive or dead nuclease may not have nickase activity. Such a catalytically inactive or dead nuclease may not make either double-strand or single-strand break on a target polynucleotide but may still bind or otherwise form complex with the target polynucleotide.

[0052] In an embodiment, eukaryotic homologues of bacterial TnpB may be utilized in the present invention. These TnpB-like proteins, Fanzor 1 and Fanzor 2, while having a shared amino acid motif in their C-terminal half regions, are variable in their N terminal regions. See, Bao et al., Homologues of bacterial TnpB_IS605 are widespread in diverse eukaryotic transposable elements. Mobile DNA 4, 12 (2013). Doi:10.1186/1759-8753-4-12. In an aspect, the conserved sequence between TnpB and fanzor comprise D-X(125, 275)-[TS]-[TS]-X-X-[C4 zinc finger]-X(5,50)-RD. Fanzor proteins, in addition to varying in their N-terminal region from TnpB have higher diversity, with Fanzor proteins associated with different transposons and compositions. With Applicant's discovery of the nucleic acid component and mechanism for reprogramming TnpB polypeptide activity, the similarity of the Fanzor systems may allow for similar use and applications.

[0053] In one embodiment, the modifications of the TnpB polypeptide may or may not cause an altered functionality. By means of example, modifications which do not result in an altered functionality include for instance codon optimization for expression into a particular host, or providing the nuclease with a particular marker (e.g., for visualization). Modifications with may result in altered functionality may also include mutations, including point mutations, insertions, deletions, truncations (including split nucleases), etc., as well as chimeric nucleases (e.g., comprising domains from different orthologues or homologues) or fusion proteins. Fusion proteins may without limitation include, for instance, fusions with heterologous domains or functional domains (e.g., localization signals, catalytic domains, etc.). In one embodiment, various different modifications may be combined (e.g., a mutated nuclease which is catalytically inactive and which further is fused to a functional domain, such as for instance to induce DNA methylation or another nucleic acid modification, such as including without limitation, a break (e.g., by a different nuclease (domain)), a mutation, a deletion, an insertion, a replacement, a ligation, a digestion, a break or a recombination). As used herein, “altered functionality” includes without limitation an altered specificity (e.g., altered target recognition, increased (e.g., “enhanced” TnpB polypeptide) or decreased specificity, or altered TAM recognition), altered activity (e.g., increased or decreased catalytic activity, including catalytically inactive nucleases or nickases), and/or altered stability (e.g., fusions with destabilization domains). Examples of all these modifications are known in the art. It will be understood that a “modified” nuclease as referred to herein, and in particular a “modified” TnpB polypeptide or system or complex preferably still has the capacity to interact with or bind to the polynucleic acid (e.g., in complex with the nucleic acid component molecule). Such modified TnpB polypeptide can be combined with the deaminase protein or active domain thereof as described herein.

[0054] In one embodiment, an unmodified TnpB polypeptides may have cleavage activity. In one embodiment, the TnpB polypeptides may direct cleavage of one or both nucleic acid (DNA or RNA) strands at the location of or near a target sequence, such as within the target sequence and/or within the complement of the target sequence or at sequences associated with the target sequence. In one embodiment, the TnpB polypeptides may direct cleavage of one or both DNA or RNA strands within about 1, 2, 3, 4, 5, 6, 7, 8, 9, 10, 15, 20, 25, 50, 100, 200, 500, or more base pairs or nucleotides from the first or last nucleotide of a target sequence. In one embodiment, the cleavage may be staggered, i.e., generating sticky ends. In one embodiment, the cleavage is a staggered cut with a 5′ overhang. In one embodiment, the cleavage is a staggered cut with a 5′ overhang of 1 to 5 nucleotides, preferably of 4 or 5 nucleotides. In particular embodiments, the TnpB polypeptides cleave DNA strands.

[0055] In one embodiment, a TnpB polypeptide may be mutated with respect to a corresponding wild-type enzyme such that the mutated TnpB lacks the ability to cleave one or both strands of a target polynucleotide containing a target sequence. As a further example, two or more catalytic domains of a TnpB polypeptide (e.g., RuvC) may be mutated to produce a mutated TnpB polypeptide substantially lacking all DNA cleavage activity. In one embodiment, a TnpB polypeptide may be considered to substantially lack all polynucleotide cleavage activity when the polynucleotide cleavage activity of the mutated enzyme is no more than 25%, no more than 10%, no more than 5%, no more than 1%, no more than 0.1%, no more than 0.01% of the nucleic acid cleavage activity of the non-mutated form of the enzyme; an example can be when the nucleic acid cleavage activity of the mutated form is nil or negligible as compared with the non-mutated form.

[0056] In one embodiment, the TnpB polypeptide may comprise one or more modifications resulting in enhanced activity and/or specificity, such as including mutating residues that stabilize the targeted or non-targeted strand. In one embodiment, the altered or modified activity of the engineered TnpB polypeptide comprises increased targeting efficiency or decreased off-target binding. In one embodiment, the altered activity of the engineered TnpB polypeptide comprises modified cleavage activity. In one embodiment, the altered activity comprises increased cleavage activity as to the target polynucleotide loci. In one embodiment, the altered activity comprises decreased cleavage activity as to the target polynucleotide loci. In one embodiment, the altered activity comprises decreased cleavage activity as to off-target polynucleotide loci. In one embodiment, the modified nuclease comprises a modification that alters association of the protein with the nucleic acid molecule comprising RNA, or a strand of the target polynucleotide loci, or a strand of off-target polynucleotide loci. In an aspect of the invention, the engineered TnpB polypeptide comprises a modification that alters formation of the TnpB polypeptide and related complex. In one embodiment, the altered activity comprises increased cleavage activity as to off-target polynucleotide loci. Accordingly, in one embodiment, there is increased specificity for target polynucleotide loci as compared to off-target polynucleotide loci. In other embodiments, there is reduced specificity for target polynucleotide loci as compared to off-target polynucleotide loci. In one embodiment, the mutations result in decreased off-target effects (e.g., cleavage or binding properties, activity, or kinetics), such as in case for TnpB polypeptide for instance resulting in a lower tolerance for mismatches between target and the ωRNA. Other mutations may lead to increased off-target effects (e.g., cleavage or binding properties, activity, or kinetics). Other mutations may lead to increased or decreased on-target effects (e.g., cleavage or binding properties, activity, or kinetics). In one embodiment, the mutations result in altered (e.g., increased or decreased) activity, association, or formation of the functional nuclease complex. Examples mutations include mutation of negative or neutral residues to positively charged residues, or positively charged residues to neutral or neutral residues to negative residues and/or (evolutionary) conserved residues, such as conserved positively charged residues, in order to enhance specificity. See e.g., Zhou et al., Chem Rev. 2018 Feb. 28: 118(4): 1691-1741, doi: 10.1021/acs/chemrev.7b00305 (discussing electrostatic interactions in protein binding and effects of amino acid mutations on such electrostatic interactions). In one embodiment, such residues may be mutated to uncharged residues, such as alanine. Because the TnpB polypeptide interacts with guide or bound DNA over the length of the TnpB polypeptide, mutation of residues across the TnpB polypeptide may be utilized for altered activity. In an aspect, the TnpB polypeptide residues for mutation are altered based on amino acid sequence positions of Deinococcus radiodurans ISDra2, see e.g., Karvelis et al., Nature 599, 692-696 (2021). The ISDra2 amino acid any comprise the sequence:

(SEQ ID NO: 2313)
MIRNKAFVVRLYPNAAQTELINRTLGSARFVYNHFLARRIAAYKES
GKGLTYGQTSSELTLLKQAEETSWLSEVDKFALQNSLKNLETAYK
NFFRTVKQSGKKVGFPRFRKKRTGESYRTQFTNNNIQIGEGRLKL
PKLGWVKTKGQQDIQGKILNVTVRRIHEGHYEASVLCEVEIPYLP
AAPKFAAGVDVGIKDFAIVTDGVRFKHEQNPKYYRSTLKRLRKAQ
QTLSRRKKGSARYGKAKTKLARIHKRIVNKRQDFLHKLTTSLVRE
YEIIGTEHLKPDNMRKNRRLALSISDAGWGEFIRQLEYKAAWYGR
LVSKVSPYFPSSQLCHDCGFKNPEVKNLAVRTWTCPNCGETHDRD
ENAALNIRREALVAAGISDTLNAHGGYVRPASAGNGLRSENHATL
VV

[0057] In an embodiment, one or more residues are mutated to alter the TAM specificity of the TnpB polypeptide. In an aspect, the one or more mutations correspond to one or more of 52TYR, 53GLY, 56SER, 57SER, 60THR, 72SER, 75ASP, 76LYS, 77PHE, 80GLN, 84LYS, 119ARG, 121GLN, 122PHE, 123THR, 124ASN, 125ASN, 126ASN, 137PRO, 138LYS, 153LYS, 155LEU, and 172LEU based on amino acid sequence positions of ISDra2.

[0058] In one embodiment, one or more residues are mutated to alter the specificity and/or activity of the TnpB selected from one or more of 6ALA, 7PHE, 8VAL, 9VAL, 10ARG, 11LEU, 12TYR, 35PHE, 36LEU, 39ARG, 40 ILE, 42ALA, 43TYR, 46SER, 47GLY, 48LYS, 49GLY, 50LEU, 51THR, 52TYR, 95ARG, 96 THR, 97VAL, 98LYS, 99GLN, 100 SER, 101 GLY, 102 LYS, 103LYS, 104VAL, 105 GLY, 106PHE, 107 PRO, 108 ARG, 109 PHE, 110 ARG, 111 LYS, 112 LYS, 113 ARG,114 THR, 115 GLY, 116GLU, 117 SER, 118TYR, 119ARG, 120THR, 121GLN, 154ILE, 155LEU, 156ASN, 157VAL, 158THR, 159VAL, 160 ARG, 161 ARG, 162 ILE, 163 HIS, 164 GLU, 165 GLY, 166 HIS, 167 TYR, 168GLU, 169 ALA, 170 SER, 171VAL, 172 LEU, 173CYS, 174GLU, 215TYR, 216ARG, 217 SER, 218 THR, 219LEU, 220LYS, 221ARG, 222LEU, 223ARG, 224LYS, 225ALA, 226 GLN, 227GLN, 228THR, 229LEU, 230SER, 231ARG, 232ARG, 233LYS, 234LYS, 235GLY, 236SER, 237ALA, 238ARG, 239YR, 240 GLY, 241 LYS, 242 ALA, 243 LYS, 244THR, 245LYS, 246LEU, 247ALA, 248 ARG, 249ILE, 250HIS, 251LYS, 252ARG, 253ILE, 254VAL, 283ASP, 284ASN, 285MET, 286ARG, 287 LYS, 288ASN, 289ARG, 290ARG, 291LEU, 292ALA, 293LEU, 294SER, 295ILE, 296SER, and 297ASP based on amino acid sequence positions of ISDra2.

[0059] Without being bound by a particular scientific theory, it is believed that Type V CRISPR-Cas systems evolved from TnpB systems. Type V systems are known to possess collateral activity in vitro against single-stranded DNA, see, e.g., Chen et al., Science. 2018 Apr. 27; 360(6387): 436-439.

### Specialty TnpB Systems

[0060] In one embodiment, the system is a TnpB-based system that is capable of performing a specialized function or activity. For example, the TnpB protein may be fused, operably coupled to, or otherwise associated with one or more heterologous functionals domains. In certain example embodiments, the TnpB protein may be a catalytically dead TnpB protein and/or have nickase activity. A nickase is an TnpB protein that cuts only one strand of a double stranded target. In such embodiments, the catalytically inactive TnpB or nickase provide a sequence specific targeting functionality via the ωRNA that delivers the functional domain to or proximate a target sequence.

[0061] It is also envisaged that the TnpB complex as a whole may be associated with two or more functional domains. For example, there may be two or more functional domains associated with the TnpB polypeptide, or there may be two or more functional domains associated with the nucleic acid component (via one or more adaptor proteins or aptamers), or there may be one or more functional domains associated with the TnpB polypeptide and one or more functional domains associated with the nucleic acid component.

[0062] In one embodiment, one or more functional domains are associated with a TnpB polypeptide via an adaptor protein, for example as used with the modified guides of Konnerman et al. (Nature 517, 583-588, 29 Jan. 2015). In one embodiment, the one or more functional domains is attached to the adaptor protein so that upon binding of the TnpB polypeptide to the RNA molecule and target, the functional domain is in a spatial orientation allowing for the functional domain to function in its attributed function.

[0063] In one embodiment, one or more functional domains are associated with a dead nucleic acid component. In one embodiment, a complex with active TnpB polypeptide directs gene regulation by a functional domain at on gene locus while a functional domain associated with the nucleic acid component directs DNA cleavage by the active TnpB polypeptide at another. In one embodiment, nucleic acid components are selected to increase selectivity of regulation for a gene locus of interest compared to off-target regulation. In one embodiment, nucleic acid components are selected to increase target gene regulation and reduce target cleavage. Loops of the nucleic aci component may be extended, without colliding with the TnpB polypeptide by the insertion of distinct loop(s) or distinct sequence(s) that may recruit adaptor proteins that can bind to the distinct loop(s) or distinct sequence(s). The adaptor proteins may include but are not limited to orthogonal polynucleotide-binding protein/aptamer combinations that exist within the diversity of bacteriophage coat proteins. A list of such coat proteins includes, but is not limited to: Qβ, F2, GA, fr, JP501, M12, R17, BZ13, JP34, JP500, KU1, M11, MX1, TW18, VK, SP, FI, ID2, NL95, TW 19, AP205, φCb5, φCb8r, φCb12r, φCb23r, 7s and PRR1. These adaptor proteins or orthogonal RNA binding proteins can further recruit effector proteins or fusions which comprise one or more functional domains.

[0064] Example functional domains that may be fused to, operably coupled to, or otherwise associated with an TnpB protein can be or include, but are not limited to a nuclear localization signal (NLS) domain, a nuclear export signal (NES) domain, a translational activation domain, a transcriptional activation domain (e.g., VP64, p65, MyoD1, HSF1, RTA, and SET7/9), a translation initiation domain, a transcriptional repression domain (e.g., a KRAB domain, NuE domain, NcoR domain, and a SID domain such as a SID4X domain), a nuclease domain (e.g., FokI), a histone modification domain (e.g., a histone acetyltransferase), a light inducible/controllable domain, a chemically inducible/controllable domain, a transposase domain, a homologous recombination machinery domain, a recombinase domain, a ligase domain, a topoisomerase domain, an integrase domain, and combinations thereof. In an embodiment, the functional domain is an HNH domain, and may be used with a naturally catalytically inactive TnpB protein to engineer a nickase. Methods for generating catalytically dead TnpB or a nickase TnpB can be adapted from approaches in Cas9 proteins, see, for example, WO 2014/204725, Ran et al. Cell. 2013 Sep. 12; 154(6):1380-1389, known in the art and incorporated herein by reference. Briefly, one or more mutations in the catalytic domain of the RuvC domain and/or the HNH domain of the TnpB protein can be introduced that may reduce or abolish NHEJ activity. In an aspect, at least one mutation in the RuvC domain and at least one mutation in the HNH domain is provided. In an embodiment, the TnpB polypeptide comprises a mutation at D191 and/or E278 based on amino acid sequence positions of Deinococcus radiodurans ISDra2. In an aspect, the amino acid mutations comprise D191A and/or E278A based on amino acid sequence positions of Deinococcus radiodurans ISDra2.

[0065] In one embodiment, the functional domains can have one or more of the following activities: nucleobase deaminse activity, reverse transcriptase activity, retrotransposase activity, transposase activity, integrase activity, recombinase activity, topoisomerase activity, ligase activity, polymerase activity, helicase activity, methylase activity, demethylase activity, translation activation activity, translation initiation activity, translation repression activity, transcription activation activity, transcription repression activity, transcription release factor activity, histone modification activity, nuclease activity (e.g., VirD2), single-strand RNA cleavage activity, double-strand RNA cleavage activity, single-strand DNA cleavage activity, double-strand DNA cleavage activity, molecular switch activity, chemical inducibility, light inducibility, and nucleic acid binding activity. In one embodiment, the one or more functional domains may comprise epitope tags or reporters. Non-limiting examples of epitope tags include histidine (His) tags, V5 tags, FLAG tags, influenza hemagglutinin (HA) tags, Myc tags, VSV-G tags, and thioredoxin (Trx) tags. Examples of reporters include, but are not limited to, glutathione-S-transferase (GST), horseradish peroxidase (HRP), chloramphenicol acetyltransferase (CAT) beta-galactosidase, beta-glucuronidase, luciferase, green fluorescent protein (GFP), HcRed, DsRed, cyan fluorescent protein (CFP), yellow fluorescent protein (YFP), and auto-fluorescent proteins including blue fluorescent protein (BFP).

[0066] The one or more functional domain(s) may be positioned at, near, and/or in proximity to a terminus of the effector protein (e.g., a TnpB protein). In embodiments having two or more functional domains, each of the two can be positioned at or near or in proximity to a terminus of the effector protein (e.g., a TnpB protein). In one embodiment, such as those where the functional domain is operably coupled to the effector protein, the one or more functional domains can be tethered or linked via a suitable linker (including, but not limited to, GlySer linkers) to the effector protein (e.g., a TnpB protein). When there is more than one functional domain, the functional domains can be same or different. In one embodiment, all the functional domains are the same. In one embodiment, all of the functional domains are different from each other. In one embodiment, at least two of the functional domains are different from each other. In one embodiment, at least two of the functional domains are the same as each other.

[0067] Histone modifying domains are also preferred In one embodiment. Exemplary histone modifying domains are discussed below. Transposase domains, HR (Homologous Recombination) machinery domains, recombinase domains, and/or integrase domains are also preferred as the present functional domains. In one embodiment, DNA integration activity includes HR machinery domains, integrase domains, recombinase domains and/or transposase domains.

[0068] In one embodiment, the DNA cleavage activity is due to a nuclease. In one embodiment, the nuclease comprises a Fok1 nuclease. See, “Dimeric CRISPR RNA-guided FokI nucleases for highly specific genome editing”, Shengdar Q. Tsai, Nicolas Wyvekens, Cyd Khayter, Jennifer A. Foden, Vishal Thapar, Deepak Reyon, Mathew J. Goodwin, Martin J. Aryee, J. Keith Joung Nature Biotechnology 32(6): 569-77 (2014), relates to dimeric RNA-guided FokI Nucleases that recognize extended sequences and can edit endogenous genes with high efficiencies in human cells.

[0069] Functional domains may be used to regulate transcription, e.g., transcriptional repression. Transcriptional repression is often mediated by chromatin modifying enzymes such as histone methyltransferases (HMTs) and deacetylases (HDACs). Repressive histone effector domains are known, and an exemplary list is provided below. Proteins and functional truncations of small size to facilitate efficient viral packaging (for instance via AAV) are preferred. In general, however, the domains may include HDACs, histone methyltransferases (HMTs), and histone acetyltransferase (HAT) inhibitors, as well as HDAC and HMT recruiting proteins. The functional domain may be or include, In one embodiment, HDAC Effector Domains, HDAC Recruiter Effector Domains, Histone Methyltransferase (HMT) Effector Domains, Histone Methyltransferase (HMT) Recruiter Effector Domains, or Histone Acetyltransferase Inhibitor Effector Domains.

[0070] In one embodiment, the functional domain may be a Methyltransferase (HMT) Effector Domain. Preferred examples include NUE, vSET, EHMT2/G9A, SUV39H1, dim-5, KYP, SUVR4, SET4, SET1, SETD8, and TgSET8. NUE is exemplified in the present Examples and, although preferred, it is envisaged that others in the class will also be useful.

[0071] In one embodiment, the functional domain may be a Histone Methyltransferase (HMT) Recruiter Effector Domain. Preferred examples include Hp1a, PHF 19, and NIPP1.

[0072] In one embodiment, the functional domain may be Histone Acetyltransferase Inhibitor Effector Domain. Preferred examples include SET/TAF-1β.

[0073] In some cases, the target endogenous (regulatory) control elements (such as enhancers and silencers) in addition to a promoter or promoter-proximal elements. Thus, the invention can also be used to target endogenous control elements (including enhancers and silencers) in addition to targeting of the promoter. These control elements can be located upstream and downstream of the transcriptional start site (TSS), starting from 200 bp from the TSS to 100 kb away. Targeting of known control elements can be used to activate or repress the gene of interest. In some cases, a single control element can influence the transcription of multiple target genes. Targeting of a single control element could therefore be used to control the transcription of multiple genes simultaneously.

[0074] Targeting of putative control elements on the other hand (e.g., by tiling the region of the putative control element as well as 200 bp up to 100 kB around the element) can be used as a means to verify such elements (by measuring the transcription of the gene of interest) or to detect novel control elements (e.g., by tiling 100 kb upstream and downstream of the TSS of the gene of interest). In addition, targeting of putative control elements can be useful in the context of understanding genetic causes of disease. Many mutations and common SNP variants associated with disease phenotypes are located outside coding regions. Targeting of such regions with either the activation or repression systems described herein can be followed by readout of transcription of either a) a set of putative targets (e.g., a set of genes located in closest proximity to the control element) or b) whole-transcriptome readout by e.g., RNAseq or microarray. This would allow for the identification of likely candidate genes involved in the disease phenotype. Such candidate genes could be useful as novel drug targets.

[0075] In one embodiment the one or more functional domains comprise an acetyltransferase, preferably a histone acetyltransferase. These are useful in the field of epigenomics, for example in methods of interrogating the epigenome. Methods of interrogating the epigenome may include, for example, targeting epigenomic sequences. Targeting epigenomic sequences may include the ωRNA being directed to an epigenomic target sequence. Epigenomic target sequence may include, In one embodiment, include a promoter, silencer or an enhancer sequence.

[0076] The functional domains may be acetyltransferases domains. Examples of acetyltransferases are known but may include, in one embodiment, histone acetyltransferases. In one embodiment, the histone acetyltransferase may comprise the catalytic core of the human acetyltransferase p300 (Gerbasch & Reddy, Nature Biotech 6th April 2015).

### Nuclear Localization Sequences

[0077] In one embodiment, the TnpB polypeptide is fused to one or more nuclear localization sequences (NLSs), such as about or more than about 1, 2, 3, 4, 5, 6, 7, 8, 9, 10, or more NLSs. In one embodiment, the TnpB polypeptide comprises about or more than about 1, 2, 3, 4, 5, 6, 7, 8, 9, 10, or more NLSs at or near the amino-terminus, about or more than about 1, 2, 3, 4, 5, 6, 7, 8, 9, 10, or more NLSs at or near the carboxy-terminus, or a combination of these (e.g., zero or at least one or more NLS at the amino-terminus and zero or at one or more NLS at the carboxy terminus). When more than one NLS is present, each may be selected independently of the others, such that a single NLS may be present in more than one copy and/or in combination with one or more other NLSs present in one or more copies. In a preferred embodiment of the invention, the TnpB polypeptide comprises at most 6 NLSs. In one embodiment, an NLS is considered near the N- or C-terminus when the nearest amino acid of the NLS is within about 1, 2, 3, 4, 5, 10, 15, 20, 25, 30, 40, 50, or more amino acids along the polypeptide chain from the N- or C-terminus. Non-limiting examples of NLSs include an NLS sequence derived from: the NLS of the SV40 virus large T-antigen, having the amino acid sequence PKKKRKV (SEQ ID NO: 2314); the NLS from nucleoplasmin (e.g., the nucleoplasmin bipartite NLS with the sequence KRPAATKKAGQAKKKK (SEQ ID NO: 2315); the c-myc NLS having the amino acid sequence PAAKRVKLD (SEQ ID NO: 2316) or RQRRNELKRSP (SEQ ID NO: 2317); the hRNPA1 M9 NLS having the sequence NQSSNFGPMKGGNFGGRSSGPYGGGGQYFAKPRNQGGY (SEQ ID NO: 2318); the sequence RMRIZFKNKGKDTAELRRRRVEVSVELRKAKKDEQILKRRNV (SEQ ID NO: 2319) of the IBB domain from importin-alpha; the sequences VSRKRPRP (SEQ ID NO: 2320) and PPKKARED (SEQ ID NO: 2321) of the myoma T protein; the sequence PQPKKKPL (SEQ ID NO: 2322) of human p53; the sequence SALIKKKKKMAP (SEQ ID NO: 2323) of mouse c-abl IV; the sequences DRLRR (SEQ ID NO: 2324) and PKQKKRK (SEQ ID NO: 2325) of the influenza virus NS1; the sequence RKLKKKIKKL (SEQ ID NO: 2326) of the Hepatitis virus delta antigen; the sequence REKKKFLKRR (SEQ ID NO: 2327) of the mouse Mx1 protein; the sequence KRKGDEVDGVDEVAKKKSKK (SEQ ID NO: 2328) of the human poly(ADP-ribose) polymerase; and the sequence RKCLQAGMNLEARKTKK (SEQ ID NO: 2329) of the steroid hormone receptors (human) glucocorticoid. In general, the one or more NLSs are of sufficient strength to drive accumulation of the TnpB polypeptide in a detectable amount in the nucleus of a eukaryotic cell. In general, strength of nuclear localization activity may derive from the number of NLSs in the TnpB polypeptide, the particular NLS(s) used, or a combination of these factors. Detection of accumulation in the nucleus may be performed by any suitable technique. For example, a detectable marker may be fused to the TnpB polypeptide, such that location within a cell may be visualized, such as in combination with a means for detecting the location of the nucleus (e.g., a stain specific for the nucleus such as DAPI). Cell nuclei may also be isolated from cells, the contents of which may then be analyzed by any suitable process for detecting protein, such as immunohistochemistry, Western blot, or enzyme activity assay. Accumulation in the nucleus may also be determined indirectly, such as by an assay for the effect of complex formation (e.g., assay for DNA cleavage or mutation at the target sequence, or assay for altered gene expression activity affected by complex formation and/or TnpB polypeptide activity), as compared to a control no exposed to the TnpB polypeptide or complex or exposed to a TnpB polypeptide lacking the one or more NLSs. In one embodiment of the herein described TnpB polypeptide protein complexes and systems the codon optimized TnpB polypeptide proteins comprise an NLS attached to the C-terminal of the protein. In one embodiment, other localization tags may be fused to the TnpB polypeptide, such as without limitation for localizing the TnpB polypeptide to particular sites in a cell, such as organelles, such as mitochondria, plastids, chloroplast, vesicles, golgi, (nuclear or cellular) membranes, ribosomes, nucleolus, ER, cytoskeleton, vacuoles, centrosome, nucleosome, granules, centrioles, etc.

[0078] In one embodiment of the invention, at least one nuclear localization signal (NLS) is attached to the nucleic acid sequences encoding the TnpB polypeptide. In preferred embodiments at least one or more C-terminal or N-terminal NLSs are attached (and hence nucleic acid molecule(s) coding for the TnpB polypeptide can include coding for NLS(s) so that the expressed product has the NLS(s) attached or connected). In a preferred embodiment a C-terminal NLS is attached for optimal expression and nuclear targeting in eukaryotic cells, preferably human cells. The invention also encompasses methods for delivering multiple nucleic acid components, wherein each nucleic acid component is specific for a different target locus of interest thereby modifying multiple target loci of interest. The nucleic acid component of the complex may comprise one or more protein-binding RNA aptamers. The one or more aptamers may be capable of binding a bacteriophage coat protein.

### Linkers

[0079] In some preferred embodiments, the functional domain is linked to a TnpB polypeptide (e.g., an active or a dead TnpB polypeptide) to target and activate epigenomic sequences such as promoters or enhancers. One or more ωRNAs directed to such promoters or enhancers may also be provided to direct the binding of the TnpB polypeptide to such promoters or enhancers.

[0080] The term “associated with” is used here in relation to the association of the functional domain to the TnpB polypeptide protein or the adaptor protein. It is used in respect of how one molecule ‘associates’ with respect to another, for example between an adaptor protein and a functional domain, or between the TnpB polypeptide protein and a functional domain. In the case of such protein-protein interactions, this association may be viewed in terms of recognition in the way an antibody recognizes an epitope. Alternatively, one protein may be associated with another protein via a fusion of the two, for instance one subunit being fused to another subunit. Fusion typically occurs by addition of the amino acid sequence of one to that of the other, for instance via splicing together of the nucleotide sequences that encode each protein or subunit. Alternatively, this may essentially be viewed as binding between two molecules or direct linkage, such as a fusion protein. In any event, the fusion protein may include a linker between the two subunits of interest (i.e. between the enzyme and the functional domain or between the adaptor protein and the functional domain). Thus, in one embodiment, the TnpB polypeptide protein or adaptor protein is associated with a functional domain by binding thereto. In other embodiments, the TnpB polypeptide or adaptor protein is associated with a functional domain because the two are fused together, optionally via an intermediate linker.

[0081] The term “linker” as used in reference to a fusion protein refers to a molecule which joins the proteins to form a fusion protein. Generally, such molecules have no specific biological activity other than to join or to preserve some minimum distance or other spatial relationship between the proteins. However, in one embodiment, the linker may be selected to influence some property of the linker and/or the fusion protein such as the folding, net charge, or hydrophobicity of the linker.

[0082] Suitable linkers for use in the methods of the present invention are well known to those of skill in the art and include, but are not limited to, straight or branched-chain carbon linkers, heterocyclic carbon linkers, or peptide linkers. However, as used herein the linker may also be a covalent bond (carbon-carbon bond or carbon-heteroatom bond). In particular embodiments, the linker is used to separate the TnpB polypeptide and the nucleotide deaminase by a distance sufficient to ensure that each protein retains its required functional property. Preferred peptide linker sequences adopt a flexible extended conformation and do not exhibit a propensity for developing an ordered secondary structure. In one embodiment, the linker can be a chemical moiety which can be monomeric, dimeric, multimeric, or polymeric. Preferably, the linker comprises amino acids. Typical amino acids in flexible linkers include Gly, Asn and Ser. Accordingly, in particular embodiments, the linker comprises a combination of one or more of Gly, Asn and Ser amino acids. Other near neutral amino acids, such as Thr and Ala, also may be used in the linker sequence. Exemplary linkers are disclosed in Maratea et al. (1985), Gene 40:39-46; Murphy et al. (1986) Proc. Nat'l. Acad. Sci. USA 83:8258-62; U.S. Pat. Nos. 4,935,233; and 4,751,180. For example, GlySer linkers GGS, GGGS (SEQ ID NO: 2330) or GSG can be used. GGS, GSG, GGGS (SEQ ID NO: 2330) or GGGGS (SEQ ID NO: 2331) linkers can be used in repeats of 3 (such as (GGS); (SEQ ID NO: 2332), (GGGGS)₃ (SEQ ID NO: 2333)) or 5, 6, 7, 9 or even 12 or more, to provide suitable lengths. In some cases, the linker may be (GGGGS)₃₋₁₅ (SEQ ID NOS: 2333-2344), For example, in some cases, the linker may be (GGGGS)₃₋₁₁ (SEQ ID NO: 2333-2341), e.g., GGGGS (SEQ ID NO: 2331), (GGGGS)₂ (SEQ ID NO: 2347), (GGGGS)₃ (SEQ ID NO: 2333), (GGGGS)+ (SEQ ID NO: 2334), (GGGGS)₅ (SEQ ID NO: 2335), (GGGGS)₆ (SEQ ID NO: 2336), (GGGGS)₇ (SEQ ID NO: 2337), (GGGGS)₈ (SEQ ID NO: 2338), (GGGGS), (SEQ ID NO: 2339), (GGGGS)₁₀ (SEQ ID NO: 2340), or (GGGGS)₁₁ (SEQ ID NO: 2341).

[0083] In particular embodiments, linkers such as (GGGGS)₃ (SEQ ID NO: 2333) are preferably used herein. (GGGGS)₆ (SEQ ID NO: 2336), (GGGGS)₉ (SEQ ID NO: 2339) or (GGGGS)₁₂ (SEQ ID NO: 2342) may preferably be used as alternatives. Other preferred alternatives are (GGGGS)₁ (SEQ ID NO: 2331), (GGGGS)₂ (SEQ ID NO: 2347), (GGGGS)₄ (SEQ ID NO: 2334), (GGGGS)₅ (SEQ ID NO: 2335), (GGGGS)₇ (SEQ ID NO: 2337), (GGGGS)₈ (SEQ ID NO: 2338), (GGGGS)₁₀ (SEQ ID NO: 2340), or (GGGGS)₁₁ (SEQ ID NO: 2341). In yet a further embodiment, LEPGEKPYKCPECGKSFSQSGALTRHQRTHTR (SEQ ID NO: 2348) is used as a linker. In yet an additional embodiment, the linker is an XTEN linker. In particular embodiments, the TnpB polypeptide is linked to the deaminase protein or its catalytic domain by means of an LEPGEKPYKCPECGKSFSQSGALTRHQRTHTR (SEQ ID NO: 2348) linker. In further particular embodiments, TnpB polypeptide is linked C-terminally to the N-terminus of a deaminase protein or its catalytic domain by means of an LEPGEKPYKCPECGKSFSQSGALTRHQRTHTR (SEQ ID NO: 2348) linker. In addition, N- and C-terminal NLSs can also function as linker (e.g., PKKKRKVEASSPKKRKVEAS (SEQ ID NO: 2349)).

[0084] Examples of linkers are shown in Table 2 below.

TABLE 2

| | |
|---|---|
| GGS | GGTGGTAGT |
| GGSx3 (9) | GGTGGTAGTGGAGGGAGCGGCGGTTCA |
| (SEQ ID NO: | (SEQ ID NO: 2350) |
| 2332) | |
| GGSx7 (21) | ggtggaggaggctctggtggaggcggt |
| (SEQ ID NO: | agcggaggcggagggtcgGGTGGTAGT |
| 2351) | GGAGGGAGCGGCGGTTCA |
| | (SEQ ID NO: 2352) |
| XTEN | TCGGGATCTGAGACGCCTGGGACCTCG |
| | GAATCGGCTACGCCCGAAAGT |
| | (SEQ ID NO: 2353) |
| Z-EGFR | Gtggataacaaatttaacaaagaaatg |
| _Short | tgggcggcgtgggaagaaattcgtaac |
| | ctgccgaacctgaacggctggcagatg |
| | accgcgtttattgcgagcctggtggat |
| | gatccgagccagagcgcgaacctgctg |
| | gcggaagcgaaaaaactgaacgatgcg |
| | caggcgccgaaaaccggcggtggttct |
| | ggt |
| | (SEQ ID NO: 2354) |
| GSAT | Ggtggttctgccggtggctccggttct |
| | ggctccagcggtggcagctctggtgcg |
| | tccggcacgggtactgcgggtggcact |
| | ggcagcggttccggtactggctctggc |
| | (SEQ ID NO: 2355) |

[0085] Linkers may be used between the ωRNA molecules and the functional domain (activator or repressor), or between the TnpB polypeptide and the functional domain. The linkers may be used to engineer appropriate amounts of “mechanical flexibility”.

[0086] In one embodiment, the one or more functional domains are controllable, e.g., inducible.

[0087] Other suitable functional domains can be found, for example, in International Application Publication No. WO 2019/018423, for example, at [0678]-[0692], incorporated herein by reference. Exemplary functional domains are further detailed elsewhere herein.

### ωRNA Molecules

[0088] The TnpB systems herein may further comprise one or more nucleic acid components, which are also referred to herein as OMEGA RNA (ωRNA). Such nucleic acid component may comprise RNA, DNA, or combinations thereof and include modified and non-canonical nucleotides as described further below. The ωRNA can comprise a reprogrammable spacer sequence and a scaffold that interacts with the TnpB polypeptide. ωRNA may form a complex (Ω complex) with a TnpB polypeptide, and direct sequence-specific binding of the complex to a target sequence of a target polynucleotide. In one example embodiment, the ωRNA is a single molecule comprising a scaffold sequence and a spacer sequence. In certain example embodiments, the spacer is 5′ of the scaffold sequence. In one example embodiment, the ωRNA may further comprise a conserved nucleic acid sequence between the scaffold and spacer portions.

[0089] In embodiments, the ωRNA comprises a spacer sequence and a scaffold sequence, e.g., a conserved nucleotide sequence. In embodiments, the ωRNA comprises about 45 to about 250 nucleotides, or about 45, 46, 47 48, 49, 50, 51, 52, 53, 54, 55, 56, 57, 58, 59, 60, 61, 62, 63, 64, 65, 66, 67, 68, 69, 70, 71, 72, 73, 74, 75, 76, 77, 78, 79, 80, 81, 82, 83, 84, 85, 86, 87, 88, 89, 90, 91, 92, 93, 94, 95, 96, 97, 98, 99, 100, 101, 102, 103, 104, 105, 106, 107, 108, 109, 110, 111, 112, 113, 114, 115, 116, 117, 118, 119, 120, 121, 122, 123, 124, 125, 126, 127, 128, 129, 130, 131, 132, 133, 134, 135, 136, 17, 138, 19, 140, 141, 142, 143, 144, 145, 146, 147, 148, 149, 150, 151, 152, 153, 154, 155, 156, 157, 158, 159, 160, 11, 162, 163, 164, 165, 166, 167, 168, 169, 170, 171, 172, 173, 174, 175, 176, 177, 178, 179, 180. 181, 182, 183, 184, 185, 186, 187, 188, 189, 190, 191, 192, 193, 194, 195, 196, 197, 198, 199, 200, 201, 202, 203, 204, 205, 206, 207, 208, 209, 210, 211, 212, 213, 214, 215, 216, 217, 218, 219, 220, 221, 222, 223, 224, 225, 226, 227, 228, 229, 230, 231, 232, 233, 234, 235, 236, 237, 238, 239, 240, 241, 242, 243, 244, 245, 246, 247, 248, 249, or 250 nucleotides.

[0090] In embodiments, the ωRNA comprises a scaffold sequence, e.g., a conserved nucleotide sequence. The scaffold sequence therefore typically comprises conserved regions, with the scaffold comprising about 30 to 200 nucleotides, about 50 to 180, about 80 to 175 nucleotides, or about 30, 31, 32, 33, 34, 35, 36, 37, 38, 39 40, 41, 42, 43, 44, 45, 46, 47 48, 49, 50, 51, 52, 53, 54, 55, 56, 57, 58, 59, 60, 61, 62, 63, 64, 65, 66, 67, 68, 69, 70, 71, 72, 73, 74, 75, 76, 77, 78, 79, 80, 81, 82, 83, 84, 85, 86, 87, 88, 89, 90, 91, 92, 93, 94, 95, 96, 97, 98, 99, 100, 101, 102, 103, 104, 105, 106, 107, 108, 109, 110, 111, 112, 113, 114, 115, 116, 117, 118, 119, 120, 121, 122, 123, 124, 125, 126, 127, 128, 129, 130, 131, 132, 133, 134, 135, 136, 137, 138, 139, 140, 141, 142, 143, 144, 145, 146, 147, 148, 149, 150, 151, 152, 153, 154, 155, 156, 157, 158, 159, 160, 161, 162, 163, 164, 165, 166, 167, 168, 169, 170, 171, 172, 173, 174, 175, 176, 177, 178, 179, 180 or more nt. In an aspect, the nucleic acid component scaffold comprises one conserved nucleotide sequence. In embodiments, the conserved nucleotide sequence is on or near a 5′ end of the scaffold.

[0091] The ωRNA may further comprise a spacer, which can be re-programmed to direct site-specific binding to a target sequence of a target polynucleotide. The spacer may also be referred to herein as part of the ωRNA scaffold or ωRNA and may comprise an engineered heterologous sequence. In an embodiment the scaffold may comprise a sequence from Table 5. In an embodiment, the scaffold comprises one or more conserved sequences to the RNA conserved region in Table 5 and depicted in FIG. 2. In one embodiment, the secondary structure of the ωRNA comprises multi-hairpin regions. In an aspect, the RNA species comprises the RNA conserved region+guide sequence, which is distinct from but generally related to the DR+spacer configuration of CRISPR-Cas systems.

[0092] In one embodiment, the spacer length of the ωRNA is from 10 to 50 nt. In one embodiment, the spacer length of the ωRNA is at least 10, 11, 12, 13, 14, or 15 nucleotides. In one embodiment, the spacer length is from 10 to 40 nucleotides, from 15 to 30 nt, 15 to 17 nt, e.g., 15, 16, or 17 nt, from 17 to 20 nt, e.g., 17, 18, 19, or 20 nt, from 20 to 24 nt, e.g., 20, 21, 22, 23, or 24 nt, from 23 to 25 nt, e.g., 23, 24, or 25 nt, from 24 to 27 nt, e.g., 24, 25, 26, or 27 nt, from 27 to 30 nt, e.g., 27, 28, 29, or 30 nt, from 30 to 35 nt, e.g., 30, 31, 32, 33, 34, or 35 nt, or 35 nt or longer. In example embodiments, the spacer sequence is 14, 15, 16, 17, 18, 19, 20, 21, 22, 23, 24, 25, 26, 27, 28, 29, 30, 31, 32, 33, 34, 35, 36, 37, 38, 39 40, 41, 42, 43, 44, 45, 46, 47 48, 49, or 50 nt.

[0093] In one embodiment, the sequence of the ωRNA is selected to reduce the degree secondary structure within the ωRNA. In one embodiment, about or less than about 75%, 50%, 40%, 30%, 25%, 20%, 15%, 10%, 5%, 1%, or fewer of the nucleotides of the nucleic acid-targeting ωRNA component participate in self-complementary base pairing when optimally folded. Optimal folding may be determined by any suitable polynucleotide folding algorithm. Some programs are based on calculating the minimal Gibbs free energy. An example of one such algorithm is mFold, as described by Zuker and Stiegler (Nucleic Acids Res. 9 (1981), 133-148). Another example of a folding algorithm is the online webserver RNAfold, developed at Institute for Theoretical Chemistry at the University of Vienna, using the centroid structure prediction algorithm (see e.g., A. R. Gruber et al., 2008, Cell 106(1): 23-24; and PA Carr and GM Church, 2009, Nature Biotechnology 27(12): 1151-62).

[0094] As used herein, a heterologous ωRNA is an ωRNA that is not derived from the same species as the TnpB polypeptide, or comprises a portion of the molecule, e.g., spacer, that is not derived from the same species as the TnpB polypeptide. For example, a heterologous ωRNA of a TnpB polypeptide derived from species A comprises a polynucleotide derived from a species different from species A, or an artificial polynucleotide.

[0095] In a particular embodiment, the ωRNA comprises a spacer sequence linked to a conserved nucleotide sequence, wherein the conserved nucleotide sequence may comprise one or more stem loops or optimized secondary structures. In particular embodiments, the conserved nucleotide sequence has a minimum length of 16 nts and a single stem loop. In further embodiments the conserved nucleotide sequence has a length longer than 16 nts, preferably more than 17 nts, and has more than one stem loops or optimized secondary structures. In particular embodiments, the spacer sequence may be linked to all or part of the natural conserved nucleotide sequence. In particular embodiments, certain aspects of the ωRNA architecture can be modified, for example by addition, subtraction, or substitution of features, whereas certain other aspects of architecture are maintained. Preferred locations for engineered ωRNA modifications, including but not limited to insertions, deletions, and substitutions include ωRNA termini and regions of the ωRNA that are exposed when complexed with TnpB polypeptide and/or target.

[0096] In one embodiment, the ωRNA forms a stemloop with a separate non-covalently linked sequence, which can be DNA or RNA. In particular embodiments, the sequences forming the ωRNA are first synthesized using the standard phosphoramidite synthetic protocol (Herdewijn, P., ed., Methods in Molecular Biology Col 288, Oligonucleotide Synthesis: Methods and Applications, Humana Press, New Jersey (2012)). In one embodiment, these sequences can be functionalized to contain an appropriate functional group for ligation using the standard protocol known in the art (Hermanson, G. T., Bioconjugate Techniques, Academic Press (2013)). Examples of functional groups include, but are not limited to, hydroxyl, amine, carboxylic acid, carboxylic acid halide, carboxylic acid active ester, aldehyde, carbonyl, chlorocarbonyl, imidazolylcarbonyl, hydrozide, semicarbazide, thio semicarbazide, thiol, maleimide, haloalkyl, sufonyl, ally, propargyl, diene, alkyne, and azide. Once this sequence is functionalized, a covalent chemical bond or linkage can be formed between this sequence and the conserved nucleotide sequence. Examples of chemical bonds include, but are not limited to, those based on carbamates, ethers, esters, amides, imines, amidines, aminotrizines, hydrozone, disulfides, thioethers, thioesters, phosphorothioates, phosphorodithioates, sulfonamides, sulfonates, fulfones, sulfoxides, ureas, thioureas, hydrazide, oxime, triazole, photolabile linkages, C—C bond forming groups such as Diels-Alder cyclo-addition pairs or ring-closing metathesis pairs, and Michael reaction pairs.

[0097] In one embodiment, these stem-loop forming sequences can be chemically synthesized. In one embodiment, the chemical synthesis uses automated, solid-phase oligonucleotide synthesis machines with 2′-acetoxyethyl orthoester (2′-ACE) (Scaringe et al., J. Am. Chem. Soc. (1998) 120:11820-11821; Scaringe, Methods Enzymol. (2000) 317:3-18) or 2′-thionocarbamate (2′-TC) chemistry (Dellinger et al., J. Am. Chem. Soc. (2011) 133:11540-11546; Hendel et al., Nat. Biotechnol. (2015) 33:985-989).

[0098] The repeat: anti repeat duplex will be apparent from the secondary structure of the ωRNA component. It may be typically a first complimentary stretch after (in 5′ to 3′ direction) the poly U tract and before the tetraloop; and a second complimentary stretch after (in 5′ to 3′ direction) the tetraloop and before the poly A tract. The first complimentary stretch (the “repeat”) is complimentary to the second complimentary stretch (the “anti-repeat”). As such, they Watson-Crick base pair to form a duplex of dsRNA when folded back on one another. As such, the anti-repeat sequence is the complimentary sequence of the repeat and in terms to A-U or C-G base pairing, but also in terms of the fact that the anti-repeat is in the reverse orientation due to the tetraloop.

[0099] In an embodiment of the invention, modification of the ωRNA component molecule architecture comprises replacing bases in stemloop 2. For example, in one embodiment, “actt” (“acuu” in RNA) and “aagt” (“aagu” in RNA) bases in stemloop2 are replaced with “cgcc” and “gcgg”. In one embodiment, “actt” and “aagt” bases in stemloop2 are replaced with complimentary GC-rich regions of 4 nucleotides. In one embodiment, the complimentary GC-rich regions of 4 nucleotides are “cgcc” and “gcgg” (both in 5′ to 3′ direction). In one embodiment, the complimentary GC-rich regions of 4 nucleotides are “gcgg” and “cgcc” (both in 5′ to 3′ direction). Other combination of C and G in the complimentary GC-rich regions of 4 nucleotides will be apparent including CCCC and GGGG.

[0100] In one aspect, the stemloop 2, e.g., “ACTTgtttAAGT (SEQ ID NO: 2356)” can be replaced by any “XXXXgtttYYYY (SEQ ID NO: 2357)”, e.g., where XXXX and YYYY represent any complementary sets of nucleotides that together will base pair to each other to create a stem.

[0101] As used herein, the term “spacer” may also be referred to as a “guide sequence.” In one embodiment, the degree of complementarity of the spacer sequence to a given target sequence, when optimally aligned using a suitable alignment algorithm, is about or more than 50%, 60%, 75%, 80%, 85%, 90%, 95%, 97.5%, 99%, or more. In certain example embodiments, the ωRNA molecule comprises a spacer sequence that may be designed to have at least one mismatch with the target sequence, such that an RNA duplex formed between the sequence and the target sequence. Accordingly, the degree of complementarity is less than 99%. For instance, where the spacer sequence consists of 24 nucleotides, the degree of complementarity is more particularly about 96% or less. In particular embodiments, the spacer sequence is designed to have a stretch of two or more adjacent mismatching nucleotides, such that the degree of complementarity over the entire sequence is further reduced. For instance, where the spacer sequence consists of 24 nucleotides, the degree of complementarity is more particularly about 96% or less, more particularly, about 92% or less, more particularly about 88% or less, more particularly about 84% or less, more particularly about 80% or less, more particularly about 76% or less, more particularly about 72% or less, depending on whether the stretch of two or more mismatching nucleotides encompasses 2, 3, 4, 5, 6 or 7 nucleotides, etc. In one embodiment, aside from the stretch of one or more mismatching nucleotides, the degree of complementarity, when optimally aligned using a suitable alignment algorithm, is about or more than about 50%, 60%, 75%, 80%, 85%, 90%, 95%, 97.5%, 99%, or more. Optimal alignment may be determined with the use of any suitable algorithm for aligning sequences, non-limiting example of which include the Smith-Waterman algorithm, the Needleman-Wunsch algorithm, algorithms based on the Burrows-Wheeler Transform (e.g., the Burrows Wheeler Aligner), ClustalW, Clustal X, BLAT, Novoalign (Novocraft Technologies; available at www.novocraft.com), ELAND (Illumina, San Diego, CA), SOAP (available at soap.genomics.org.cn), and Maq (available at maq.sourceforge.net). The ability of a sequence (within a nucleic acid-targeting ωRNA t molecule) to direct sequence-specific binding of a nucleic acid-targeting complex to a target nucleic acid sequence may be assessed by any suitable assay. For example, the components of a ωRNA system sufficient to form a TnpB-targeting complex, including the ωRNA molecule sequence to be tested, may be provided to a host cell having the corresponding target nucleic acid sequence, such as by transfection with vectors encoding the components of the TnpB-targeting complex, followed by an assessment of preferential targeting (e.g., cleavage) within the target nucleic acid sequence, such as by Surveyor assay as described herein. Similarly, cleavage of a target nucleic acid sequence (or a sequence in the vicinity thereof) may be evaluated in a test tube by providing the target nucleic acid sequence, components of a TnpB-targeting complex, including the sequence to be tested and a control sequence different from the test ωRNA, and comparing binding or rate of cleavage at or in the vicinity of the target sequence between the test and control ωRNA molecule sequence reactions. Other assays are possible, and will occur to those skilled in the art. A spacer sequence, and hence a nucleic acid-targeting ωRNA may be selected to target any target nucleic acid sequence.

[0102] A ωRNA, and hence a nucleic acid-targeting spacer, may be selected to target any target nucleic acid sequence. The target sequence may be DNA. The target sequence may be any RNA sequence. In one embodiment, the target sequence may be a sequence within an RNA molecule selected from the group consisting of messenger RNA (mRNA), pre-mRNA, ribosomal RNA (rRNA), transfer RNA (tRNA), micro-RNA (miRNA), small interfering RNA (siRNA), small nuclear RNA (snRNA), small nucleolar RNA (snoRNA), double stranded RNA (dsRNA), non-coding RNA (ncRNA), long non-coding RNA (lncRNA), and small cytoplasmatic RNA (scRNA). In some preferred embodiments, the target sequence may be a sequence within an RNA molecule selected from the group consisting of mRNA, pre-mRNA, and rRNA. In some preferred embodiments, the target sequence may be a sequence within an RNA molecule selected from the group consisting of ncRNA, and lncRNA. In some more preferred embodiments, the target sequence may be a sequence within an mRNA molecule or a pre-mRNA molecule.

[0103] In one embodiment, the ωRNA forms a stemloop with a separate non-covalently linked sequence, which can be DNA or RNA. In particular embodiments, the sequences forming the ωRNA component are first synthesized using the standard phosphoramidite synthetic protocol (Herdewijn, P., ed., Methods in Molecular Biology Col 288, Oligonucleotide Synthesis: Methods and Applications, Humana Press, New Jersey (2012)). In one embodiment, these sequences can be functionalized to contain an appropriate functional group for ligation using the standard protocol known in the art (Hermanson, G. T., Bioconjugate Techniques, Academic Press (2013)). Examples of functional groups include, but are not limited to, hydroxyl, amine, carboxylic acid, carboxylic acid halide, carboxylic acid active ester, aldehyde, carbonyl, chlorocarbonyl, imidazolylcarbonyl, hydrozide, semicarbazide, thio semicarbazide, thiol, maleimide, haloalkyl, sufonyl, ally, propargyl, diene, alkyne, and azide. Once this sequence is functionalized, a covalent chemical bond or linkage can be formed between this sequence and the conserved nucleotide sequence. Examples of chemical bonds include, but are not limited to, those based on carbamates, ethers, esters, amides, imines, amidines, aminotrizines, hydrozone, disulfides, thioethers, thioesters, phosphorothioates, phosphorodithioates, sulfonamides, sulfonates, fulfones, sulfoxides, ureas, thioureas, hydrazide, oxime, triazole, photolabile linkages, C—C bond forming groups such as Diels-Alder cyclo-addition pairs or ring-closing metathesis pairs, and Michael reaction pairs.

### ωRNA Chemical Modifications

[0104] In one embodiment, these stem-loop forming sequences can be chemically synthesized. In one embodiment, the chemical synthesis uses automated, solid-phase oligonucleotide synthesis machines with 2′-acetoxyethyl orthoester (2′-ACE) (Scaringe et al., J. Am. Chem. Soc. (1998) 120:11820-11821; Scaringe, Methods Enzymol. (2000) 317:3-18) or 2′-thionocarbamate (2′-TC) chemistry (Dellinger et al., J. Am. Chem. Soc. (2011) 133:11540-11546; Hendel et al., Nat. Biotechnol. (2015) 33:985-989).

[0105] In one embodiment, the ωRNA component molecule comprises non-naturally occurring nucleic acids and/or non-naturally occurring nucleotides and/or nucleotide analogs, and/or chemically modifications. Preferably, these non-naturally occurring nucleic acids and non-naturally occurring nucleotides are located outside the ωRNA sequence. Non-naturally occurring nucleic acids can include, for example, mixtures of naturally and non-naturally occurring nucleotides. Non-naturally occurring nucleotides and/or nucleotide analogs may be modified at the ribose, phosphate, and/or base moiety. In an embodiment of the invention, a ωRNA component nucleic acid comprises ribonucleotides and non-ribonucleotides. In one such embodiment, a ωRNA component comprises one or more ribonucleotides and one or more deoxyribonucleotides. In an embodiment of the invention, the ωRNA component comprises one or more non-naturally occurring nucleotide or nucleotide analog such as a nucleotide with phosphorothioate linkage, a locked nucleic acid (LNA) nucleotide comprising a methylene bridge between the 2′ and 4′ carbons of the ribose ring or bridged nucleic acids (BNA). Other examples of modified nucleotides include 2′-O-methyl analogs, 2′-deoxy analogs, or 2′-fluoro analogs. Further examples of modified bases include, but are not limited to, 2-aminopurine, 5-bromo-uridine, pseudouridine, inosine, 7-methylguanosine. Examples of ωRNA chemical modifications include, without limitation, incorporation of 2′-O-methyl (M), 2′-O-methyl 3′phosphorothioate (MS), S-constrained ethyl(cEt), or 2′-O-methyl 3′thioPACE (MSP) at one or more terminal nucleotides. Such chemically modified ωRNA components can comprise increased stability and increased activity as compared to unmodified ωRNA components, though on-target vs. off-target specificity is not predictable. (See, Hendel, 2015, Nat Biotechnol. 33(9):985-9, doi:10.1038/nbt.3290, published online 29 Jun. 2015 Ragdarm et al., 0215, PNAS, E7110-E7111; Allerson et al., J. Med. Chem. 2005, 48:901-904; Bramsen et al., Front. Genet., 2012, 3:154; Deng et al., PNAS, 2015, 112:11870-11875; Sharma et al., MedChemComm., 2014, 5:1454-1471; Hendel et al., Nat. Biotechnol. (2015) 33(9): 985-989; Li et al., Nature Biomedical Engineering, 2017, 1, 0066 DOI: 10.1038/s41551-017-0066). In one embodiment, the 5′ and/or 3′ end of a ωRNA component is modified by a variety of functional moieties including fluorescent dyes, polyethylene glycol, cholesterol, proteins, or detection tags. (See Kelly et al., 2016, J. Biotech. 233:74-83). In one embodiment, a ωRNA component comprises ribonucleotides in a region that binds to a target sequence and one or more deoxyribonucleotides and/or nucleotide analogs in a region that binds to the TnpB polypeptide. In an embodiment, deoxyribonucleotides and/or nucleotide analogs are incorporated in engineered ωRNA component structures. In one embodiment, 3-5 nucleotides at either the 3′ or the 5′ end of a ωRNA component is chemically modified. In one embodiment, only minor modifications are introduced in the seed region, such as 2′-F modifications. In one embodiment, 2′-F modification is introduced at the 3′ end of a ωRNA component. In one embodiment, three to five nucleotides at the 5′ and/or the 3′ end of the ωRNA component are chemically modified with 2′-O-methyl (M), 2′-O-methyl 3′ phosphorothioate (MS), S-constrained ethyl(cEt), or 2′-O-methyl 3′ thioPACE (MSP). Such modification can enhance genome editing efficiency (see Hendel et al., Nat. Biotechnol. (2015) 33(9): 985-989). In one embodiment, all of the phosphodiester bonds of a ωRNA component are substituted with phosphorothioates (PS) for enhancing levels of gene disruption. In one embodiment, more than five nucleotides at the 5′ and/or the 3′ end of the ωRNA component are chemically modified with 2′-O-Me, 2′-F or S-constrained ethyl(cEt). Such chemically modified ωRNA component can mediate enhanced levels of gene disruption (see Ragdarm et al., 0215, PNAS, E7110-E7111). In an embodiment of the invention, a RNA component is modified to comprise a chemical moiety at its 3′ and/or 5′ end. Such moieties include, but are not limited to amine, azide, alkyne, thio, dibenzocyclooctyne (DBCO), or Rhodamine. In certain embodiment, the chemical moiety is conjugated to the ωRNA component by a linker, such as an alkyl chain. In one embodiment, the chemical moiety of the modified Nucleic acid component can be used to attach the ωRNA component to another molecule, such as DNA, RNA, protein, or nanoparticles. Such chemically modified ωRNA component can be used to identify or enrich cells generically edited by a TnpB polypeptide and related systems (see Lee et al., eLife, 2017, 6:e25312, DOI:10.7554).

[0106] In a particular embodiment, the conserved nucleotide sequence may be modified to comprise one or more protein-binding RNA aptamers. In a particular embodiment, one or more aptamers may be included such as part of optimized secondary structure. Such aptamers may be capable of binding a bacteriophage coat protein as detailed further herein.

[0107] In embodiments, the TnpB polypeptide utilizes the ωRNA component scaffold comprising a polynucleotide sequence that facilitates the interaction with the TnpB protein, allowing for sequence specific binding and/or targeting of the Nucleic acid component molecule with the target polynucleotide. Chemical synthesis of the ωRNA component scaffold is contemplated, using covalent linkage using various bioconjugation reactions, loops, bridges, and non-nucleotide links via modifications of sugar, internucleotide phosphodiester bonds, purine and pyrimidine residues. Sletten et al., Angew. Chem. Int. Ed. (2009) 48:6974-6998; Manoharan, M. Curr. Opin. Chem. Biol. (2004) 8:570-9; Behlke et al., Oligonucleotides (2008) 18:305-19; Watts, et al., Drug. Discov. Today (2008) 13:842-55; Shukla, et al., ChemMedChem (2010) 5:328-49; chemical synthesis using automated, solid-phase oligonucleotide synthesis machines with 2′-acetoxyethyl orthoester (2′-ACE) (Scaringe et al., J. Am. Chem. Soc. (1998) 120:11820-11821; Scaringe, Methods Enzymol. (2000) 317:3-18) or 2′-thionocarbamate (2′-TC) chemistry (Dellinger et al., J. Am. Chem. Soc. (2011) 133:11540-11546; Hendel et al., Nat. Biotechnol. (2015) 33:985-989).

[0108] In certain example embodiments, the scaffold and spacer may designed as two separate molecules that can hybridize or covalently joined into a single molecule. Covalent linkage can be via a linker (e.g., a non-nucleotide loop) that comprises a moiety such as spacers, attachments, bioconjugates, chromophores, reporter groups, dye labeled RNAs, and non-naturally occurring nucleotide analogues. More specifically, suitable spacers for purposes of this invention include, but are not limited to, polyethers (e.g., polyethylene glycols, polyalcohols, polypropylene glycol or mixtures of ethylene and propylene glycols), polyamines group (e.g., spennine, spermidine and polymeric derivatives thereof), polyesters (e.g., poly(ethyl acrylate)), polyphosphodiesters, alkylenes, and combinations thereof. Suitable attachments include any moiety that can be added to the linker to add additional properties to the linker, such as but not limited to, fluorescent labels. Suitable bioconjugates include, but are not limited to, peptides, glycosides, lipids, cholesterol, phospholipids, diacyl glycerols and dialkyl glycerols, fatty acids, hydrocarbons, enzyme substrates, steroids, biotin, digoxigenin, carbohydrates, polysaccharides. Suitable chromophores, reporter groups, and dye-labeled RNAs include, but are not limited to, fluorescent dyes such as fluorescein and rhodamine, chemiluminescent, electrochemiluminescent, and bioluminescent marker compounds. The design of example linkers conjugating two nucleic acid components which can be adapted for use with ωRNAs are also described in WO 2004/015075.

[0109] The linker (e.g., a non-nucleotide loop) can be of any length. In one embodiment, the linker has a length equivalent to about 0-16 nucleotides. In one embodiment, the linker has a length equivalent to about 0-8 nucleotides. In one embodiment, the linker has a length equivalent to about 0-4 nucleotides. In one embodiment, the linker has a length equivalent to about 2 nucleotides. Example linker design is also described in International Patent Publication No. WO 2011/008730.

### Escorted ωRNA Components

[0110] In particular embodiments, the compositions or complexes have a ωRNA component molecule with a functional structure designed to improve ωRNA component molecule structure, architecture, stability, genetic expression, or any combination thereof. Such a structure can include an aptamer.

[0111] Aptamers are biomolecules that can be designed or selected to bind tightly to other ligands, for example using a technique called systematic evolution of ligands by exponential enrichment (SELEX; Tuerk C, Gold L: “Systematic evolution of ligands by exponential enrichment: RNA ligands to bacteriophage T4 DNA polymerase.” Science 1990, 249:505-510). Nucleic acid aptamers can for example be selected from pools of random-sequence oligonucleotides, with high binding affinities and specificities for a wide range of biomedically relevant targets, suggesting a wide range of therapeutic utilities for aptamers (Keefe, Anthony D., Supriya Pai, and Andrew Ellington. “Aptamers as therapeutics.” Nature Reviews Drug Discovery 9.7 (2010): 537-550). These characteristics also suggest a wide range of uses for aptamers as drug delivery vehicles (Levy-Nissenbaum, Etgar, et al. “Nanotechnology and aptamers: applications in drug delivery.” Trends in biotechnology 26.8 (2008): 442-449; and, Hicke B J, Stephens A W. “Escort aptamers: a delivery service for diagnosis and therapy.” J Clin Invest 2000, 106:923-928.). Aptamers may also be constructed that function as molecular switches, responding to a que by changing properties, such as RNA aptamers that bind fluorophores to mimic the activity of green fluorescent protein (Paige, Jeremy S., Karen Y. Wu, and Samie R. Jaffrey. “RNA mimics of green fluorescent protein.” Science 333.6042 (2011): 642-646). It has also been suggested that aptamers may be used as components of targeted siRNA therapeutic delivery systems, for example targeting cell surface proteins (Zhou, Jiehua, and John J. Rossi. “Aptamer-targeted cell-specific RNA interference.” Silence 1.1 (2010): 4).

[0112] Accordingly, in particular embodiments, the ωRNA component molecule is modified, e.g., by one or more aptamer(s) designed to improve ωRNA component molecule delivery, including delivery across the cellular membrane, to intracellular compartments, or into the nucleus. Such a structure can include, either in addition to the one or more aptamer(s) or without such one or more aptamer(s), moiety(ies) so as to render the Nucleic acid component molecule deliverable, inducible or responsive to a selected effector. The invention accordingly comprehends a ωRNA component molecule that responds to normal or pathological physiological conditions, including without limitation pH, hypoxia, O2 concentration, temperature, protein concentration, enzymatic concentration, lipid structure, light exposure, mechanical disruption (e.g., ultrasound waves), magnetic fields, electric fields, or electromagnetic radiation.

[0113] Light responsiveness of an inducible system may be achieved via the activation and binding of cryptochrome-2 and CIB1. Blue light stimulation induces an activating conformational change in cryptochrome-2, resulting in recruitment of its binding partner CIB1. This binding is fast and reversible, achieving saturation in <15 sec following pulsed stimulation and returning to baseline <15 min after the end of stimulation. These rapid binding kinetics result in a system temporally bound only by the speed of transcription/translation and transcript/protein degradation, rather than uptake and clearance of inducing agents. Crytochrome-2 activation is also highly sensitive, allowing for the use of low light intensity stimulation and mitigating the risks of phototoxicity. Further, in a context such as the intact mammalian brain, variable light intensity may be used to control the size of a stimulated region, allowing for greater precision than vector delivery alone may offer.

[0114] Energy sources such as electromagnetic radiation, sound energy or thermal energy may induce the Nucleic acid component molecule. Advantageously, the electromagnetic radiation is a component of visible light. In a preferred embodiment, the light is a blue light with a wavelength of about 450 to about 495 nm. In an especially preferred embodiment, the wavelength is about 488 nm. In another preferred embodiment, the light stimulation is via pulses. The light power may range from about 0-9 mW/cm2. In a preferred embodiment, a stimulation paradigm of as low as 0.25 sec every 15 sec should result in maximal activation.

[0115] The chemical or energy sensitive ωRNA component may undergo a conformational change upon induction by the binding of a chemical source or by the energy allowing it act as a ωRNA and have the TnpB polypeptide system or complex function. The invention can involve applying the chemical source or energy so as to have the ωRNA function and the TnpB polypeptide system or complex function; and optionally further determining that the expression of the genomic locus is altered.

[0116] There are several different designs of this chemical inducible system: 1. ABI-PYL based system inducible by Abscisic Acid (ABA) (see, e.g., stke.sciencemag.org/cgi/content/abstract/sigtrans;4/164/rs2), 2. FKBP-FRB based system inducible by rapamycin (or related chemicals based on rapamycin) (see, e.g., nature.com/nmeth/journal/v2/n6/full/nmeth763.html), 3. GID1-GAI based system inducible by Gibberellin (GA) (see, e.g., nature.com/nchembio/journal/v8/n5/full/nchembio.922.html).

[0117] A chemical inducible system can be an estrogen receptor (ER) based system inducible by 4-hydroxytamoxifen (4OHT) (see, e.g., pnas.org/content/1Apr. 3, 1027.abstract). A mutated ligand-binding domain of the estrogen receptor called ERT2 translocates into the nucleus of cells upon binding of 4-hydroxytamoxifen. In further embodiments of the invention any naturally occurring or engineered derivative of any nuclear receptor, thyroid hormone receptor, retinoic acid receptor, estrogen receptor, estrogen-related receptor, glucocorticoid receptor, progesterone receptor, androgen receptor may be used in inducible systems analogous to the ER based inducible system.

[0118] Another inducible system is based on the design using Transient receptor potential (TRP) ion channel-based system inducible by energy, heat, or radio-wave (see, e.g., sciencemag.org/content/336/6081/604). These TRP family proteins respond to different stimuli, including light and heat. When this protein is activated by light or heat, the ion channel will open and allow the entering of ions such as calcium into the plasma membrane. This influx of ions will bind to intracellular ion interacting partners linked to a polypeptide including the nucleic acid component and the other components of the TnpB polypeptide/ωRNA molecule complex or system, and the binding will induce the change of sub-cellular localization of the polypeptide, leading to the entire polypeptide entering the nucleus of cells. Once inside the nucleus, the nucleic acid component protein, and the other components of the TnpB polypeptide/ωRNA molecule complex will be active and modulating target gene expression in cells.

[0119] While light activation may be an advantageous embodiment, sometimes it may be disadvantageous especially for in vivo applications in which the light may not penetrate the skin or other organs. In this instance, other methods of energy activation are contemplated, in particular, electric field energy and/or ultrasound which have a similar effect.

[0120] Electric field energy is preferably administered substantially as described in the art, using one or more electric pulses of from about 1 Volt/cm to about 10 k Volts/cm under in vivo conditions. Instead of or in addition to the pulses, the electric field may be delivered in a continuous manner. The electric pulse may be applied for between 1 μs and 500 milliseconds, preferably between 1 us and 100 milliseconds. The electric field may be applied continuously or in a pulsed manner for 5 about minutes.

[0121] As used herein, ‘electric field energy’ is the electrical energy to which a cell is exposed. Preferably the electric field has a strength of from about 1 Volt/cm to about 10 k Volts/cm or more under in vivo conditions (see WO97/49450).

[0122] As used herein, the term “electric field” includes one or more pulses at variable capacitance and voltage and including exponential and/or square wave and/or modulated wave and/or modulated square wave forms. References to electric fields and electricity should be taken to include reference the presence of an electric potential difference in the environment of a cell. Such an environment may be set up by way of static electricity, alternating current (AC), direct current (DC), etc., as known in the art. The electric field may be uniform, non-uniform or otherwise, and may vary in strength and/or direction in a time dependent manner.

[0123] Single or multiple applications of electric field, as well as single or multiple applications of ultrasound are also possible, in any order and in any combination. The ultrasound and/or the electric field may be delivered as single or multiple continuous applications, or as pulses (pulsatile delivery).

[0124] Electroporation has been used in both in vitro and in vivo procedures to introduce foreign material into living cells. With in vitro applications, a sample of live cells is first mixed with the agent of interest and placed between electrodes such as parallel plates. Then, the electrodes apply an electrical field to the cell/implant mixture. Examples of systems that perform in vitro electroporation include the Electro Cell Manipulator ECM600 product, and the Electro Square Porator T820, both made by the BTX Division of Genetronics, Inc (see U.S. Pat. No. 5,869,326).

[0125] The known electroporation techniques (both in vitro and in vivo) function by applying a brief high voltage pulse to electrodes positioned around the treatment region. The electric field generated between the electrodes causes the cell membranes to temporarily become porous, whereupon molecules of the agent of interest enter the cells. In known electroporation applications, this electric field comprises a single square wave pulse on the order of 1000 V/cm, of about 100 .mu.s duration. Such a pulse may be generated, for example, in known applications of the Electro Square Porator T820.

[0126] Preferably, the electric field has a strength of from about 1 V/cm to about 10 kV/cm under in vitro conditions. Thus, the electric field may have a strength of 1 V/cm, 2 V/cm, 3 V/cm, 4 V/cm, 5 V/cm, 6 V/cm, 7 V/cm, 8 V/cm, 9 V/cm, 10 V/cm, 20 V/cm, 50 V/cm, 100 V/cm, 200 V/cm, 300 V/cm, 400 V/cm, 500 V/cm, 600 V/cm, 700 V/cm, 800 V/cm, 900 V/cm, 1 kV/cm, 2 kV/cm, 5 kV/cm, 10 kV/cm, 20 kV/cm, 50 kV/cm or more. More preferably from about 0.5 kV/cm to about 4.0 kV/cm under in vitro conditions. Preferably the electric field has a strength of from about 1 V/cm to about 10 kV/cm under in vivo conditions. However, the electric field strengths may be lowered where the number of pulses delivered to the target site are increased. Thus, pulsatile delivery of electric fields at lower field strengths is envisaged.

[0127] Preferably, the application of the electric field is in the form of multiple pulses such as double pulses of the same strength and capacitance or sequential pulses of varying strength and/or capacitance. As used herein, the term “pulse” includes one or more electric pulses at variable capacitance and voltage and including exponential and/or square wave and/or modulated wave/square wave forms.

[0128] Preferably, the electric pulse is delivered as a waveform selected from an exponential wave form, a square wave form, a modulated wave form and a modulated square wave form.

[0129] A preferred embodiment employs direct current at low voltage. Thus, Applicants disclose the use of an electric field which is applied to the cell, tissue or tissue mass at a field strength of between 1V/cm and 20V/cm, for a period of 100 milliseconds or more, preferably 15 minutes or more.

[0130] Ultrasound is advantageously administered at a power level of from about 0.05 W/cm² to about 100 W/cm². Diagnostic or therapeutic ultrasound may be used, or combinations thereof.

[0131] As used herein, the term “ultrasound” refers to a form of energy which consists of mechanical vibrations the frequencies of which are so high they are above the range of human hearing. Lower frequency limit of the ultrasonic spectrum may generally be taken as about 20 kHz. Most diagnostic applications of ultrasound employ frequencies in the range 1 and 15 MHz′ (From Ultrasonics in Clinical Diagnosis, P. N. T. Wells, ed., 2nd. Edition, Publ. Churchill Livingstone [Edinburgh, London & NY, 1977]).

[0132] Ultrasound has been used in both diagnostic and therapeutic applications. When used as a diagnostic tool (“diagnostic ultrasound”), ultrasound is typically used in an energy density range of up to about 100 mW/cm2 (FDA recommendation), although energy densities of up to 750 mW/cm2 have been used. In physiotherapy, ultrasound is typically used as an energy source in a range up to about 3 to 4 W/cm² (WHO recommendation). In other therapeutic applications, higher intensities of ultrasound may be employed, for example, HIFU at 100 W/cm up to 1 kW/cm2 (or even higher) for short periods of time. The term “ultrasound” as used in this specification is intended to encompass diagnostic, therapeutic, and focused ultrasound.

[0133] Focused ultrasound (FUS) allows thermal energy to be delivered without an invasive probe (see Morocz et al 1998 Journal of Magnetic Resonance Imaging Vol. 8, No. 1, pp. 136-142. Another form of focused ultrasound is high intensity focused ultrasound (HIFU) which is reviewed by Moussatov et al in Ultrasonics (1998) Vol. 36, No. 8, pp. 893-900 and TranHuuHue et al in Acustica (1997) Vol. 83, No. 6, pp. 1103-1106.

[0134] Preferably, a combination of diagnostic ultrasound and a therapeutic ultrasound is employed. This combination is not intended to be limiting, however, and the skilled reader will appreciate that any variety of combinations of ultrasound may be used. Additionally, the energy density, frequency of ultrasound, and period of exposure may be varied.

[0135] Preferably, the exposure to an ultrasound energy source is at a power density of from about 0.05 to about 100 Wcm-2. Even more preferably, the exposure to an ultrasound energy source is at a power density of from about 1 to about 15 Wcm-2.

[0136] Preferably, the exposure to an ultrasound energy source is at a frequency of from about 0.015 to about 10.0 MHz. More preferably the exposure to an ultrasound energy source is at a frequency of from about 0.02 to about 5.0 MHz or about 6.0 MHz. Most preferably, the ultrasound is applied at a frequency of 3 MHz.

[0137] Preferably the exposure is for periods of from about 10 milliseconds to about 60 minutes. Preferably the exposure is for periods of from about 1 second to about 5 minutes. More preferably, the ultrasound is applied for about 2 minutes. Depending on the particular target cell to be disrupted, however, the exposure may be for a longer duration, for example, for 15 minutes.

[0138] Advantageously, the target tissue is exposed to an ultrasound energy source at an acoustic power density of from about 0.05 Wcm-2 to about 10 Wcm-2 with a frequency ranging from about 0.015 to about 10 MHz (see WO 98/52609). However, alternatives are also possible, for example, exposure to an ultrasound energy source at an acoustic power density of above 100 Wcm-2, but for reduced periods of time, for example, 1000 Wcm-2 for periods in the millisecond range or less.

[0139] Preferably, the application of the ultrasound is in the form of multiple pulses; thus, both continuous wave and pulsed wave (pulsatile delivery of ultrasound) may be employed in any combination. For example, continuous wave ultrasound may be applied, followed by pulsed wave ultrasound, or vice versa. This may be repeated any number of times, in any order and combination. The pulsed wave ultrasound may be applied against a background of continuous wave ultrasound, and any number of pulses may be used in any number of groups.

[0140] Preferably, the ultrasound may comprise pulsed wave ultrasound. In a highly preferred embodiment, the ultrasound is applied at a power density of 0.7 Wcm-2 or 1.25 Wcm-2 as a continuous wave. Higher power densities may be employed if pulsed wave ultrasound is used.

[0141] Use of ultrasound is advantageous as, like light, it may be focused accurately on a target. Moreover, ultrasound is advantageous as it may be focused more deeply into tissues unlike light. It is therefore better suited to whole-tissue penetration (such as but not limited to a lobe of the liver) or whole organ (such as, but not limited to, the entire liver or an entire muscle, such as the heart) therapy. Another important advantage is that ultrasound is a non-invasive stimulus which is used in a wide variety of diagnostic and therapeutic applications. By way of example, ultrasound is well known in medical imaging techniques and, additionally, in orthopedic therapy. Furthermore, instruments suitable for the application of ultrasound to a subject vertebrate are widely available and their use is well known in the art.

[0142] In particular embodiments, the ωRNA molecule is modified by a secondary structure to increase the specificity of the TnpB polypeptide and related system and the secondary structure can protect against exonuclease activity and allow for 5′ additions to the nucleic acid component sequence also referred to herein as a protected nucleic acid component molecule.

[0143] In one aspect, the invention provides for hybridizing a “protector RNA” to a sequence of the nucleic acid component molecule, wherein the “protector RNA” is an RNA strand complementary to the 3′ end of the nucleic acid component molecule to thereby generate a partially double-stranded nucleic acid component. In an embodiment of the invention, protecting mismatched bases (i.e., the bases of the nucleic acid component molecule which do not form part of the nucleic acid component sequence) with a perfectly complementary protector sequence decreases the likelihood of target DNA binding to the mismatched basepairs at the 3′ end. In particular embodiments of the invention, additional sequences comprising an extended length may also be present within the nucleic acid component molecule such that the nucleic acid component comprises a protector sequence within the nucleic acid component molecule. This “protector sequence” ensures that the nucleic acid component molecule comprises a “protected sequence” in addition to an “exposed sequence” (comprising the part of the nucleic acid component sequence hybridizing to the target sequence). In particular embodiments, the nucleic acid component molecule is modified by the presence of the protector nucleic acid component to comprise a secondary structure such as a hairpin. Advantageously there are three or four to thirty or more, e.g., about 10 or more, contiguous base pairs having complementarity to the protected sequence, the nucleic acid component sequence or both. It is advantageous that the protected portion does not impede thermodynamics of the TnpB polypeptide and related system interacting with its target. By providing such an extension including a partially double stranded nucleic acid component molecule, the nucleic acid component molecule is considered protected and results in improved specific binding of the TnpB polypeptide/nucleic acid component molecule complex, while maintaining specific activity.

[0144] In particular embodiments, use is made of a truncated ωRNA component (tru-nucleic acid component), i.e., a nucleic acid component molecule which comprises a nucleic acid component sequence which is truncated in length with respect to the canonical nucleic acid component sequence length. As described by Nowak et al. (Nucleic Acids Res (2016) 44 (20): 9555-9564), such nucleic acid component molecules may allow catalytically active TnpB polypeptide to bind its target without cleaving the target DNA. In particular embodiments, a truncated nucleic acid component is used which allows the binding of the target but retains only nickase activity of the TnpB polypeptide.

[0145] In one embodiment, conjugation of triantennary N-acetyl galactosamine (GalNAc) to oligonucleotide components may be used to improve delivery, for example delivery to select cell types, for example hepatocytes (see International Patent Publication No. WO 2014/118272 incorporated herein by reference; Nair, J K et al., 2014, Journal of the American Chemical Society 136 (49), 16958-16961). This is considered to be a sugar-based particle and further details on other particle delivery systems and/or formulations are provided herein. GalNAc can therefore be considered to be a particle in the sense of the other particles described herein, such that general uses and other considerations, for instance delivery of said particles, apply to GalNAc particles as well. A solution-phase conjugation strategy may for example be used to attach triantennary GalNAc clusters (mol. wt. ˜2000) activated as PFP (pentafluorophenyl) esters onto 5′-hexylamino modified oligonucleotides (5′-HA ASOs, mol. wt. ˜8000 Da; Østergaard et al., Bioconjugate Chem., 2015, 26 (8), pp 1451-1455). Similarly, poly(acrylate) polymers have been described for in vivo nucleic acid delivery (see WO2013158141 incorporated herein by reference). In further alternative embodiments, pre-mixing TnpB polypeptide nanoparticles (or protein complexes) with naturally occurring serum proteins may be used in order to improve delivery (Akinc A et al, 2010, Molecular Therapy vol. 18 no. 7, 1357-1364).

[0146] Screening techniques are available to identify delivery enhancers, for example by screening chemical libraries (Gilleron J. et al., 2015, Nucl. Acids Res. 43 (16): 7984-8001). Approaches have also been described for assessing the efficiency of delivery vehicles, such as lipid nanoparticles, which may be employed to identify effective delivery vehicles for components (see Sahay G. et al., 2013, Nature Biotechnology 31, 653-658).

### Target Adjacent Motifs

[0147] The TnpB systems disclosed herein may recognize a target adjacent motif (TAM) in order to recognize and bind a target sequence on a target polynucldoetide. In one embodiment, the nucleic acid-guided nucleases and related compositions do not contain a TAM requirement., The precise sequence and length requirements for the TAM will differ depending on the nucleic acid-guided nucleases used. In some examples, TAMs are typically 2-5 base pair sequences adjacent the protospacer (that is, the target sequence). In one example embodiment, the TAM is 3′ adjacent to the target polynucleotide. In another example embodiment, the TAM is 5′ adjacent to the target sequence of the target polynucleotide.

[0148] In one embodiment, the cleavage site is distant from the TAM, e.g., the cleavage occurs after the nth nucleotide on the non-target strand and after the nucleotide on the targeted strand. In one embodiment, the cleavage site occurs after an identified nucleotide (counted from the TAM) on the non-target strand and after the further identified nucleotide (counted from the TAM) on the targeted strand. In one embodiment, a vector encodes a nucleic acid-targeting effector protein that may be mutated with respect to a corresponding wild-type enzyme such that the mutated nucleic acid-targeting effector protein lacks the ability to cleave one or both DNA and RNA strands of a target polynucleotide containing a target sequence.

[0149] In one example embodiment the TAM sequence is TCAG. In another example embodiment, the TAM sequence is TCAA. TAM identification and specificity may be identified, for example, using the methods disclosed in the Examples section below.

### HDR Donor Templates

[0150] In one embodiment, the compositions and systems herein may further comprise one or more HDR donor templates for use in homology-directed repair mediated editing. In some cases, the HDR donor template may comprise one or more polynucleotides. In certain cases, the HDR donor template may comprise coding sequences for one or more polynucleotides. The HDR donor template may be a DNA template.

[0151] The the HDR donor template may be used for editing the target polynucleotide. In some cases, the donor polynucleotide comprises one or more mutations to be introduced into the target polynucleotide. Examples of such mutations include substitutions, deletions, insertions, or a combination thereof. The mutations may cause a shift in an open reading frame on the target polynucleotide. In some cases, the HDR donor template alters a stop codon in the target polynucleotide. For example, the HDR donor template may correct a premature stop codon. The correction may be achieved by deleting the stop codon or introduces one or more mutations to the stop codon. In other example embodiments, the HDR donor template addresses loss of function mutations, deletions, or translocations that may occur, for example, in certain disease contexts by inserting or restoring a functional copy of a gene, or functional fragment thereof, or a functional regulatory sequence or functional fragment of a regulatory sequence. A functional fragment refers to less than the entire copy of a gene by providing sufficient nucleotide sequence to restore the functionality of a wild type gene or non-coding regulatory sequence (e.g., sequences encoding long non-coding RNA). In certain example embodiments, the systems disclosed herein may be used to replace a single allele of a defective gene or defective fragment thereof. In another example embodiment, the systems disclosed herein may be used to replace both alleles of a defective gene or defective gene fragment. A “defective gene” or “defective gene fragment” is a gene or portion of a gene that when expressed fails to generate a functioning protein or non-coding RNA with functionality of a the corresponding wild-type gene. In certain example embodiments, these defective genes may be associated with one or more disease phenotypes. In certain example embodiments, the defective gene or gene fragment is not replaced but the systems described herein are used to insert HDR donor templates that encode gene or gene fragments that compensate for or override defective gene expression such that cell phenotypes associated with defective gene expression are eliminated or changed to a different or desired cellular phenotype.

[0152] In an embodiment of the invention, the HDR donor template may include, but not be limited to, genes or gene fragments, encoding proteins or RNA transcripts to be expressed, regulatory elements, repair templates, and the like. According to the invention, the HDR donor templates may comprise left end and right end sequence elements that function with transposition components that mediate insertion.

[0153] In certain cases, the HDR donor template manipulates a splicing site on the target polynucleotide. In some examples, the HDR donor template disrupts a splicing site. The disruption may be achieved by inserting the polynucleotide to a splicing site and/or introducing one or more mutations to the splicing site. In certain examples, the HDR donor template may restore a splicing site. For example, the polynucleotide may comprise a splicing site sequence.

[0154] The HDR donor template to be inserted may has a size from 10 basepair or nucleotides to 50 kb in length, e.g., from 50 to 40 k, from 100 and 30 k, from 100 to 10000, from 100 to 300, from 200 to 400, from 300 to 500, from 400 to 600, from 500 to 700, from 600 to 800, from 700 to 900, from 800 to 1000, from 900 to from 1100, from 1000 to 1200, from 1100 to 1300, from 1200 to 1400, from 1300 to 1500, from 1400 to 1600, from 1500 to 1700, from 600 to 1800, from 1700 to 1900, from 1800 to 2000 base pairs (bp) or nucleotides in length.

### Systems and Complexes

[0155] In one aspect, the present disclosure provides nucleic acid-targeting systems. Such systems may be used to target, modify, and otherwise manipulate target polynucleotides. In one embodiment, the systems comprise the TnpB polypeptide and one or more ωRNAs. The TnpB polypeptide may have nuclease activity, e.g., capable of cleaving DNA. In some embodiments the TnpB polypeptide may, or be engineered to have have nickase activity, e.g., capable of generating a single-strand break on a double-strand nucleic acid such as dsDNA or dsRNA.

[0156] In some examples, two or more of the components in a system herein may form a complex. For example, the components are separate molecules but interact with each other directly or indirectly. In certain two or more of the components in a system herein may be comprised in a fusion protein.

[0157] As used herein, “target sequence” refers to a sequence to which a ωRNA is designed to have complementarity, where hybridization between a target sequence and a ωRNA promotes the formation of a polynucleotide targeting complex. Full complementarity is not necessarily required, provided there is sufficient complementarity to cause hybridization and promote formation of a TnpB-targeting complex. A target sequence may comprise DNA polynucleotides. In one embodiment, a target sequence is located in the nucleus or cytoplasm of a cell. In one embodiment, the target sequence may be within an organelle of a eukaryotic cell, for example, mitochondrion or chloroplast. A sequence or template that may be used for recombination into the targeted locus comprising the target sequences is referred to as an “editing template” or “editing sequence”. In aspects of the invention, an exogenous template may be referred to as an editing template. In an aspect the recombination is homologous recombination.

[0158] In one embodiment, formation of a TnpB-targeting complex (comprising a ωRNA hybridized to a target sequence and complexed with one or more nucleic acid-targeting effector proteins) results in cleavage of one or both nucleic acid strands in or near (e.g., within 1, 2, 3, 4, 5, 6, 7, 8, 9, 10, 20, 50, or more base pairs from) the target sequence. In one embodiment, one or more vectors driving expression of one or more elements of the TnpB system are introduced into a host cell such that expression of the elements of the TnpB system direct formation of a TnpB complex at one or more target sites. For example, a TnpB polypeptide and a ωRNA could each be operably linked to separate regulatory elements on separate vectors. Alternatively, two or more of the elements expressed from the same or different regulatory elements, may be combined in a single vector, with one or more additional vectors providing any components of the TnpB system not included in the first vector. TnpB system elements combined in a single vector may be arranged in any suitable orientation, such as one element located 5′ with respect to (“upstream” of) or 3′ with respect to (“downstream” of) a second element. The coding sequence of one element may be located on the same or opposite strand of the coding sequence of a second element, and oriented in the same or opposite direction. In one embodiment, a single promoter drives expression of a transcript encoding a TnpB and a ωRNA embedded within one or more intron sequences (e.g., each in a different intron, two or more in at least one intron, or all in a single intron). In one embodiment, the TnpB polypeptide and ωRNAs are operably linked to and expressed from the same promoter.

[0159] The present disclosure encompasses computational methods and algorithms to predict new TnpB polypeptides, identify the components, and new TnpB systems therein. In some examples, a computational method of identifying novel TnpB polypeptide loci analysis of the candidates may be conducted by searching metagenomics databases for additional homologs.

[0160] In one aspect the identifying all predicted protein coding genes is carried out by comparing the identified genes with TnpB polypeptide specific profiles and annotating them according to NCBI Conserved Domain Database (CDD) which is a protein annotation resource that consists of a collection of well-annotated multiple sequence alignment models for ancient domains and full-length proteins. These are available as position-specific score matrices (PSSMs) for fast identification of conserved domains in protein sequences via RPS-BLAST. CDD content includes NCBI-curated domains, which use 3D-structure information to explicitly define domain boundaries and provide insights into sequence/structure/function relationships, as well as domain models imported from a number of external source databases (Pfam, SMART, COG, PRK, TIGRFAM).

[0161] In a further aspect, the case-by-case analysis is performed using PSI-BLAST (Position-Specific Iterative Basic Local Alignment Search Tool). PSI-BLAST derives a position-specific scoring matrix (PSSM) or profile from the multiple sequence alignment of sequences detected above a given score threshold using protein-protein BLAST. This PSSM is used to further search the database for new matches and is updated for subsequent iterations with these newly detected sequences. Thus, PSI-BLAST provides a means of detecting distant relationships between proteins.

[0162] In another aspect, the case-by-case analysis is performed using HHpred, a method for sequence database searching and structure prediction that is as easy to use as BLAST or PSI-BLAST and that is at the same time much more sensitive in finding remote homologs. In fact, HHpred's sensitivity is competitive with the most powerful servers for structure prediction currently available. HHpred is the first server that is based on the pairwise comparison of profile hidden Markov models (HMMs). Whereas most conventional sequence search methods search sequence databases such as UniProt or the NR, HHpred searches alignment databases, like Pfam or SMART. This greatly simplifies the list of hits to a number of sequence families instead of a clutter of single sequences. All major publicly available profile and alignment databases are available through HHpred. HHpred accepts a single query sequence or a multiple alignment as input. Within only a few minutes it returns the search results in an easy-to-read format similar to that of PSI-BLAST. Search options include local or global alignment and scoring secondary structure similarity. HHpred can produce pairwise query-template sequence alignments, merged query-template multiple alignments (e.g., for transitive searches), as well as 3D structural models calculated by the MODELLER software from HHpred alignments.

### Specialized Systems

[0163] The TnpB polypeptide may be in a dead form, e.g., does not have nuclease or nickase activity. In one embodiment, the systems further comprising one or more functional domains, e.g., nucleotide deaminase, reverse transcriptase, non-LTR retrotransposon (and protein encoded), polymerase, diversity generating element (and protein encoded) and integrases. In some examples, the systems further comprise one or more donor polynucleotides. The donor polynucleotides may be inserted to a target polynucleotide by the systems. The donor polynucleotide may be comprised in or coded by a nucleic acid template.

### TnpB Base Editing Systems

[0164] The present disclosure also provides for base editing systems. In general, such a system may comprise a nucleobase deaminase (e.g., an adenosine deaminase or cytidine deaminase) associated (e.g., fused) with a TnpB polypeptide. The TnpB polypeptide may be a catalytically inactive, or dead TnpB polypeptide, dTnpB. In one embodiment, the nucleobase deaminase is a mutated form of an adenosine deaminase. The mutated form of the adenosine deaminase may have both adenosine deaminase and cytidine deaminase activities.

[0165] In some examples, the present disclosure provides an engineered, non-naturally occurring composition comprising: a dTnpB, a nucleobase deaminase associated with or otherwise capable of forming a complex with the dTnpB, and a ωRNA capable of forming a complex with the TnpB protein and directing site-specific binding at a target sequence at or adjacento a single nucleotide or nucleotide base pair to be edited. In an aspect, the nucleotide deaminase or other editing enzyme flips the target base within the DNA. See, e.g., Hong and Cheng et al., DNA Base Flipping: A general Mechanism for Writing Reading and Erasing DNA Modifications, Adv. Exp Med Biol., 2016:945:321-341, doi:10.1007/978-3-316-43624-1_14. Without being bound by theory, the TnpB-ωRNA complex bound to the target provides a more open pocket relative to, for example, a CRISPR-Cas protein, e.g., Cas9, Cas12, which advantageously provides more accessibility for the complex and the base flipping of the target nucleotide by the deaminase or other base editing enzyme, reducing steric hindrance and making it possible to enhance the specificity of the base editing system.

[0166] In an aspect, the bae edits can be targeted from about 2 to 100 bae pairs from the end of the TAM, or about 4 to 100, 50 to 100, 6, to 100, 7 to 100, 8 to 100, 9. To 100, 10, to 100, 11 to 100, 12 to 100, 13 to 100, 14 to 100, 15 to 100, 16 to 100, 17 to 100, 18 to 100, 18 to 100, 19 to 100, 20 to 100, 25 to 100, 3 to 90, 3 to 80, 3 to 70, 3 to 60, 3 to 50, 3 to 40, 3 to 30, or about 3 to 30 base pairs from the end of the TAM. In an aspect, when the base editor is fused to the TnpB, the linker length can be configured to allow for more precise base editing at the desired location. For example, the linker length, as detailed elsewhere herein, can be tuned to facilitate base editing closer or more distant to the TAM, and may be configured with increasing or decreasing rigidity and other properties to generate a desired configuration or presentation at the binding site. A more open configuration at the binding pocket of the TnpB complex may allow more flexibility in configuration of the TnpB editing system and specificity in access to target sites.

[0167] In one aspect, the present disclosure provides an engineered adenosine deaminase. The engineered adenosine deaminase may comprise one or more mutations herein. In one embodiment, the engineered adenosine deaminase has cytidine deaminase activity. In certain examples, the engineered adenosine deaminase has both cytidine deaminase activity and adenosine deaminase. In some cases, the modifications by base editors herein may be used for targeting post-translational signaling or catalysis. In one embodiment, compositions herein comprise nucleotide sequence comprising encoding sequences for one or more components of a base editing system. A base-editing system may comprise a deaminase (e.g., an adenosine deaminase or cytidine deaminase) fused with a TnpB polypeptide or a variant thereof. In some cases, the target polynucleotide is edited at one or more bases to introduce a G→A or C→T mutation.

[0168] In some cases, the adenosine deaminase is double-stranded RNA-specific adenosine deaminase (ADAR). Examples of ADARs include those described Yiannis A Savva et al., The ADAR protein family, Genome Biol. 2012; 13(12): 252, which is incorporated by reference in its entirety. The ADAR may be hADAR1. In one embodiment, the ADAR may be hADAR2. The sequence of hADAR2 may be that described under Accession No. AF525422.1.

[0169] In some cases, the deaminase may be a deaminase domain, e.g., a deaminase domain of ADAR (“ADAR-D”). In one example, the deaminase may be the deaminase domain of hADAR2 (“hADAR2-D”), e.g., as described in Phelps K J et al., Recognition of duplex RNA by the deaminase domain of the RNA editing enzyme ADAR2. Nucleic Acids Res. 2015 January; 43(2):1123-32, which is incorporated by reference herein in its entirety. In a particular example, the hADAR2-D has a sequence comprising amino acid 299-701 of hADAR2-D, e.g., amino acid 299-701 of the sequence under Accession No. AF525422.1.

[0170] In one embodiment, the system comprises a mutated form of an adenosine deaminase fused with a dTnpB. The mutated form of the adenosine deaminase may have both adenosine deaminase and cytidine deaminase activities. In one embodiment, the adenosine deaminase may comprise one or more of the mutations: E488Q based on amino acid sequence positions of hADAR2-D, and mutations in a homologous ADAR protein corresponding to the above. In one embodiment, the adenosine deaminase may comprise one or more of the mutations: E488Q, V351G, based on amino acid sequence positions of hADAR2-D, and mutations in a homologous ADAR protein corresponding to the above. In one embodiment, the adenosine deaminase may comprise one or more of the mutations: E488Q, V351G, S486A, based on amino acid sequence positions of hADAR2-D, and mutations in a homologous ADAR protein corresponding to the above. In one embodiment, the adenosine deaminase may comprise one or more of the mutations: E488Q, V351G, S486A, T375S, based on amino acid sequence positions of hADAR2-D, and mutations in a homologous ADAR protein corresponding to the above. In one embodiment, the adenosine deaminase may comprise one or more of the mutations: E488Q, V351G, S486A, T375S, S370C, based on amino acid sequence positions of hADAR2-D, and mutations in a homologous ADAR protein corresponding to the above. In one embodiment, the adenosine deaminase may comprise one or more of the mutations: E488Q, V351G, S486A, T375S, S370C, P462A, based on amino acid sequence positions of hADAR2-D, and mutations in a homologous ADAR protein corresponding to the above. In one embodiment, the adenosine deaminase may comprise one or more of the mutations: E488Q, V351G, S486A, T375S, S370C, P462A, N597I, based on amino acid sequence positions of hADAR2-D, and mutations in a homologous ADAR protein corresponding to the above. In one embodiment, the adenosine deaminase may comprise one or more of the mutations: E488Q, V351G, S486A, T375S, S370C, P462A, N597I, L332I, based on amino acid sequence positions of hADAR2-D, and mutations in a homologous ADAR protein corresponding to the above. In one embodiment, the adenosine deaminase may comprise one or more of the mutations: E488Q, V351G, S486A, T375S, S370C, P462A, N597I, L332I, I398V, based on amino acid sequence positions of hADAR2-D, and mutations in a homologous ADAR protein corresponding to the above. In one embodiment, the adenosine deaminase may comprise one or more of the mutations: E488Q, V351G, S486A, T375S, S370C, P462A, N597I, L332I, 1398V, K350I, based on amino acid sequence positions of hADAR2-D, and mutations in a homologous ADAR protein corresponding to the above. In one embodiment, the adenosine deaminase may comprise one or more of the mutations: E488Q, V351G, S486A, T375S, S370C, P462A, N597I, L332I, 1398V, K350I, M383L, based on amino acid sequence positions of hADAR2-D, and mutations in a homologous ADAR protein corresponding to the above. In one embodiment, the adenosine deaminase may comprise one or more of the mutations: E488Q, V351G, S486A, T375S, S370C, P462A, N597I, L332I, 1398V, K350I, M383L, D619G, based on amino acid sequence positions of hADAR2-D, and mutations in a homologous ADAR protein corresponding to the above. In one embodiment, the adenosine deaminase may comprise one or more of the mutations: E488Q, V351G, S486A, T375S, S370C, P462A, N597I, L332I, 1398V, K350I, M383L, D619G, S582T, based on amino acid sequence positions of hADAR2-D, and mutations in a homologous ADAR protein corresponding to the above. In one embodiment, the adenosine deaminase may comprise one or more of the mutations: E488Q, V351G, S486A, T375S, S370C, P462A, N597I, L332I, 1398V, K350I, M383L, D619G, S582T, V440I based on amino acid sequence positions of hADAR2-D, and mutations in a homologous ADAR protein corresponding to the above. In one embodiment, the adenosine deaminase may comprise one or more of the mutations: E488Q, V351G, S486A, T375S, S370C, P462A, N597I, L332I, I398V, K350I, M383L, D619G, S582T, V440I, S495N based on amino acid sequence positions of hADAR2-D, and mutations in a homologous ADAR protein corresponding to the above. In one embodiment, the adenosine deaminase may comprise one or more of the mutations: E488Q, V351G, S486A, T375S, S370C, P462A, N597I, L332I, 1398V, K350I, M383L, D619G, S582T, V440I, S495N, K418E based on amino acid sequence positions of hADAR2-D, and mutations in a homologous ADAR protein corresponding to the above. In one embodiment, the adenosine deaminase may comprise one or more of the mutations: E488Q, V351G, S486A, T375S, S370C, P462A, N597I, L332I, I398V, K350I, M383L, D619G, S582T, V440I, S495N, K418E, S661T based on amino acid sequence positions of hADAR2-D, and mutations in a homologous ADAR protein corresponding to the above. In some examples, provided herein includes a mutated adenosine deaminase e.g., an adenosine deaminase comprising one or more mutations of E488Q, V351G, S486A, T375S, S370C, P462A, N597I, L332I, 1398V, K350I, M383L, D619G, S582T, V440I, S495N, K418E, S661T, fused with a dead TnpB polypeptide or TnpB polypeptide nickase. In some examples, provided herein includes a mutated adenosine deaminase e.g., an adenosine deaminase comprising E488Q, V351G, S486A, T375S, S370C, P462A, N597I, L332I, 1398V, K350I, M383L, D619G, S582T, V440I, S495N, K418E, and S661T, fused with a dead TnpB polypeptide or TnpB polypeptide nickase. In some examples, provided herein includes a mutated adenosine deaminase e.g., an adenosine deaminase comprising E488Q, V351G, S486A, T375S, S370C, P462A, N597I, L332I, I398V, K350I, M383L, D619G, S582T, V440I, S495N, K418E, S661T, and S375N fused with a dead TnpB polypeptide or TnpB polypeptide nickase.

[0171] In one embodiment, the adenosine deaminase may be a tRNA-specific adenosine deaminase or a variant thereof. In one embodiment, the adenosine deaminase may comprise one or more of the mutations: W23L, W23R, R26G, H36L, N37S, P48S, P48T, P48A, I49V, R51L, N72D, L84F, S97C, A106V, D108N, H123Y, G125A, A142N, S146C, D147Y, R152H, R152P, E155V, 1156F, K157N, K161T, based on amino acid sequence positions of E. coli TadA, and mutations in a homologous deaminase protein corresponding to the above. In one embodiment, the adenosine deaminase may comprise one or more of the mutations: D108N based on amino acid sequence positions of E. coli TadA, and mutations in a homologous deaminase protein corresponding to the above. In one embodiment, the adenosine deaminase may comprise one or more of the mutations: A106V, D108N, based on amino acid sequence positions of E. coli TadA, and mutations in a homologous deaminase protein corresponding to the above. In one embodiment, the adenosine deaminase may comprise one or more of the mutations: A106V, D108N, D147Y, E155V, based on amino acid sequence positions of E. coli TadA, and mutations in a homologous deaminase protein corresponding to the above. In one embodiment, the adenosine deaminase may comprise one or more of the mutations: A106V, D108N, based on amino acid sequence positions of E. coli TadA, and mutations in a homologous deaminase protein corresponding to the above. In one embodiment, the adenosine deaminase may comprise one or more of the mutations: A106V, D108N, D147Y, E155V, L84F, H123Y, 1156F, based on amino acid sequence positions of E. coli TadA, and mutations in a homologous deaminase protein corresponding to the above. In one embodiment, the adenosine deaminase may comprise one or more of the mutations: A106V, D108N, D147Y, E155V, L84F, H123Y, 1156F, A142N, based on amino acid sequence positions of E. coli TadA, and mutations in a homologous deaminase protein corresponding to the above. In one embodiment, the adenosine deaminase may comprise one or more of the mutations: A106V, D108N, D147Y, E155V, L84F, H123Y, 1156F, H36L, R51L, S146C, K157N, based on amino acid sequence positions of E. coli TadA, and mutations in a homologous deaminase protein corresponding to the above. In one embodiment, the adenosine deaminase may comprise one or more of the mutations: A106V, D108N, D147Y, E155V, L84F, H123Y, 1156F, H36L, R51L, S146C, K157N, P48S, based on amino acid sequence positions of E. coli TadA, and mutations in a homologous deaminase protein corresponding to the above. In one embodiment, the adenosine deaminase may comprise one or more of the mutations: A106V, D108N, D147Y, E155V, L84F, H123Y, 1156F, H36L, R51L, S146C, K157N, P48S, A142N, based on amino acid sequence positions of E. coli TadA, and mutations in a homologous deaminase protein corresponding to the above. In one embodiment, the adenosine deaminase may comprise one or more of the mutations: A106V, D108N, D147Y, E155V, L84F, H123Y, 1156F, H36L, R51L, S146C, K157N, P48S, W23R, P48A, based on amino acid sequence positions of E. coli TadA, and mutations in a homologous deaminase protein corresponding to the above. In one embodiment, the adenosine deaminase may comprise one or more of the mutations: A106V, D108N, D147Y, E155V, L84F, H123Y, 1156F, H36L, R51L, S146C, K157N, P48S, W23R, P48A, A142N, based on amino acid sequence positions of E. coli TadA, and mutations in a homologous deaminase protein corresponding to the above. In one embodiment, the adenosine deaminase may comprise one or more of the mutations: A106V, D108N, D147Y, E155V, L84F, H123Y, 1156F, H36L, R51L, S146C, K157N, P48S, W23R, P48A, R152P, based on amino acid sequence positions of E. coli TadA, and mutations in a homologous deaminase protein corresponding to the above. In one embodiment, the adenosine deaminase may comprise one or more of the mutations: A106V, D108N, D147Y, E155V, L84F, H123Y, 1156F, H36L, R51L, S146C, K157N, P48S, W23R, P48A, R152P, A142N, based on amino acid sequence positions of E. coli TadA, and mutations in a homologous deaminase protein corresponding to the above.

[0172] In some examples, the base editing systems may comprise an intein-mediated trans-splicing system that enables in vivo delivery of a base editor, e.g., a split-intein cytidine base editors (CBE) or adenine base editor (ABE) engineered to trans-splice. Examples of such base editing systems include those described in Colin K. W. Lim et al., Treatment of a Mouse Model of ALS by In Vivo Base Editing, Mol Ther. 2020 Jan. 14. pii: S1525-0016(20)30011-3. doi: 10.1016/j.ymthe.2020.01.005; and Jonathan M. Levy et al., Cytosine and adenine base editing of the brain, liver, retina, heart, and skeletal muscle of mice via adeno-associated viruses, Nature Biomedical Engineering volume 4, pages 97-110(2020), which are incorporated by reference herein in their entireties.

[0173] Examples of base editing systems include those described in International Patent Publication Nos. WO 2019/071048 (e.g., paragraphs [0933]-[0938]), WO 2019/084063 (e.g., paragraphs [0173]-[0186], [0323]-[0475], [0893]-[1094]), WO 2019/126716 (e.g., paragraphs [0290]-[0425], [1077]-[1084]), WO 2019/126709 (e.g., paragraphs [0294]-[0453]), WO 2019/126762 (e.g., paragraphs [0309]-[0438]), WO 2019/126774 (e.g., paragraphs [0511]-[0670]), Cox D B T, et al., RNA editing with CRISPR-Cas13, Science. 2017 Nov. 24; 358(6366):1019-1027; Abudayyeh O O, et al., A cytosine deaminase for programmable single-base RNA editing, Science 26 Jul. 2019: Vol. 365, Issue 6451, pp. 382-386; Gaudelli N M et al., Programmable base editing of A·T to G·C in genomic DNA without DNA cleavage, Nature volume 551, pages 464-471 (23 Nov. 2017); Komor A C, et al., Programmable editing of a target base in genomic DNA without double-stranded DNA cleavage. Nature. 2016 May 19; 533(7603):420-4; Jordan L. Doman et al., Evaluation and minimization of Cas9-independent off-target DNA editing by cytosine base editors, Nat Biotechnol (2020). doi.org/10.1038/s41587-020-0414-6; and Richter M F et al., Phage-assisted evolution of an adenine base editor with improved Cas domain compatibility and activity, Nat Biotechnol (2020). doi.org/10.1038/s41587-020-0453-z, which are incorporated by reference herein in their entireties and can be used to adapt to the TnpB polypeptides.

### TnpB Prime Editing Systems

[0174] In one embodiment, the present disclosure provides compositions and systems may comprise a TnpB or a dTnpB, one or more nucleic acid components, and a reverse transcriptase. The systems may be used to insert a donor polynucleotide to a target polynucleotide. In some examples, the composition or system comprises a catalytically inactive TnpB polypeptide, a reverse transcriptase associated with or otherwise capable of forming a complex with the TnpB polypeptide, and a nucleic acid component molecule capable of forming a complex with the TnpB polypeptide and directing site-specific binding of the complex to a target sequence of a target polynucleotide, the nucleic acid component molecule further comprising a donor template which functions as a template for insertion of a donor sequence into a target polynucleotide by the reverse transcriptase.

[0175] The TnpB or dTnpB may be a nickase, e.g., a DNA nickase. The TnpB nickase may comprise or more mutations. In one embodiment, the TnpB comprises mutations corresponding to the mutations in the RuvC nuclease. In one embodiment, the TnpB is naturally catalytically inactive and comprises fusion to a nuclease domain, e.g., HNH or FokI domain.

[0176] A reverse transcriptase domain may be a reverse transcriptase or a fragment thereof. In one embodiment, the reverse transcriptase is Human immunodeficiency virus (HIV) RT, Avian myoblastosis virus (AMV) RT, Moloney murine leukemia virus (M-MLV) RT a group II intron RT, a group II intron-like RT, or a chimeric RT. In one embodiment s, the RT comprises modified forms of these RTs, such as, engineered variants of Avian myoblastosis virus (AMV) RT, Moloney murine leukemia virus (M-MLV) RT, or Human immunodeficiency virus (HIV) RT (see, e.g., Anzalone, et al., Search-and-replace genome editing without double-strand breaks or donor DNA, Nature. 2019 December; 576(7785):149-157).

[0177] The compositions and systems may comprise the TnpB protein herein; a reverse transcriptase (RT) polypeptide connected to or otherwise capable of forming a complex with the TnpB protein; and a ωRNA molecule capable of forming a complex with the TnpB protein and comprising: a ωRNA sequence capable of directing site-specific binding of the TnpB complex to a target sequence of a target polynucleotide; a 3′ binding site region capable of binding to a cleaved upstream strand of the target polynucleotide; and a RT template sequence encoding an extended sequence, wherein the extended sequence comprises a variant region and a 3′ homologous sequence capable of hybridization to the downstream cleaved strand of the target polynucleotide.

[0178] A wide variety of reverse transcriptases (RT) may be used in alternative embodiments of the present invention, including prokaryotic and eukaryotic RT, provided that the RT functions within the host to generate a donor polynucleotide sequence from the RNA template. If desired, the nucleotide sequence of a native RT may be modified, for example using known codon optimization techniques, so that expression within the desired host is optimized. A reverse transcriptase (RT) is an enzyme used to generate complementary DNA (cDNA) from an RNA template, a process termed reverse transcription. Reverse transcriptases are used by retroviruses to replicate their genomes, by retrotransposon mobile genetic elements to proliferate within the host genome, by eukaryotic cells to extend the telomeres at the ends of their linear chromosomes, and by some non-retroviruses such as the hepatitis B virus, a member of the Hepadnaviridae, which are dsDNA-RT viruses. Retroviral RT has three sequential biochemical activities: RNA-dependent DNA polymerase activity, ribonuclease H, and DNA-dependent DNA polymerase activity. Collectively, these activities enable the enzyme to convert single-stranded RNA into double-stranded cDNA. In one embodiment, the RT domain of a reverse transcriptase is used in the present invention. The domain may include only the RNA-dependent DNA polymerase activity. In some examples, the RT domain is non-mutagenic, i.e., does not cause mutation in the donor polynucleotide (e.g., during the reverse transcriptase process). In some cases, In some examples, the RT domain may be non-retron RT, e.g., a viral RT or a human endogenous RTs. In some examples, the RT domain may be retron RT or DGRs RT. In some examples, the RT may be less mutagenic than a counterpart wildtype RT. In one embodiment, the RT herein is not mutagenic.

[0179] The reverse transcriptase may be fused to the C-terminus of a TnpB. Alternatively, or additionally, the reverse transcriptase may be fused to the N-terminus of a TnpB. The fusion may be via a linker and/or an adaptor protein. In some examples, the reverse transcriptase may be an M-MLV reverse transcriptase or variant thereof. The M-MLV reverse transcriptase variant may comprise one or more mutations. For the examples, the M-MLV reverse transcriptase may comprise D200N, L603W, and T330P. In another example, the M-MLV reverse transcriptase may comprise D200N, L603W, T330P, T306K, and W313F. In a particular example, the fusion of TnpB polypeptide and reverse transcriptase is TnpB polypeptide with mutation fused with M-MLV reverse transcriptase (D200N+L603W+T330P-T306K+W313F).

[0180] The small sizes of the TnpB polypeptide herein may allow easier packaging and delivery of the prime editing system, e.g., with a viral vector, e.g., AAV or lentiviral vector. See, e.g., Lino et al. Drug Deliv. 2018; 25(1): 1234-1257; doi: 10.1080/10717544.2018.1474964, incorporated herein by reference, specifically, see table 1, incorporated herein by reference for CRISPR delivery approaches.

[0181] A single-strand break (a nick) may be generated on the target DNA by the TnpB polypeptide at the target site to expose a 3′-hydroxyl group, thus priming the reverse transcription of an edit-encoding extension on the nucleic acid component molecule directly into the target site. These steps may result in a branched intermediate with two redundant single-stranded DNA flaps: a 5′ flap that contains the unedited DNA sequence, and a 3′ flap that contains the edited sequence copied from the nucleic acid component. The 5′ flaps may be removed by a structure-specific endonuclease, e.g., FEN122, which excises 5′ flaps generated during lagging-strand DNA synthesis and long-patch base excision repair. The non-edited DNA strand may be nicked to induce bias DNA repair to preferentially replace the non-edited strand. Examples of prime editing systems and methods include those described in Anzalone A V et al., Search-and-replace genome editing without double-strand breaks or donor DNA, Nature. 2019 Oct. 21. doi: 10.1038/s41586-019-1711-4, which is incorporated by reference herein in its entirety.

[0182] The TnpB (e.g., the nickase form) may be used to prime-edit a single nucleotide on a target DNA. Alternatively or additionally, the TnpB polypeptide may be used to prime-edit at least 2, at least 3, at least 4, at least 5, at least 6, at least 7, at least 8, at least 10, at least 11, at least 12, at least 13, at least 14, at least 15, at least 16, at least 17, at least 18, at least 19, at least 20, at least 21, at least 22, at least 23, at least 24, at least 25, at least 26, at least 27, at least 28, at least 29, at least 30, at least 40, at least 50, at least 60, at least 70, at least 80, at least 90, at least 100, at least 200, at least 300, at least 400, at least 500, at least 600, at least 700, at least 800, at least 900, or at least 1000 nucleotides on a target DNA.

[0183] In yet another embodiment, PRIME editing is used first to create a longer 3′ region (e.g., 20 nucleotides). Examples of prime editing systems and methods include those described in Anzalone A V et al., Search-and-replace genome editing without double-strand breaks or donor DNA, Nature. 2019 Oct. 21. doi: 10.1038/s41586-019-1711-4, which is incorporated by reference herein in its entirety. In such cases, the system comprises a TnpB protein with nickase activity, a reverse transcriptase domain, and a DNA polymerase, and a ωRNA molecule comprising a binding sequence capable of hybridizing to the target polynucleotide and an editing sequence. The generated region may be further extended on a DNA template as described herein. The latter may allow generation of a target-independent sequence, compatible with a generic donor sequence.

[0184] The TnpB protein is capable of generating a first cleavage in the target sequence and a second cleavage outside the target sequence on the target polynucleotide. In some variations, a second TnpB-mediated cleavage in vicinity to the target site may be made, which may enable more efficient invasion of the extended DNA.

[0185] In some examples, the compositions and systems of the TnpB protein herein comprise: a reverse transcriptase (RT) polypeptide connected to or otherwise capable of forming a complex with the TnpB protein; a first ωRNA molecule capable of forming a first TnpB-Reverse transcriptase complex with the TnpB protein and comprising: a ωRNA sequence capable of directing site-specific binding of the first TnpB-Reverse transcriptase complex to a first target sequence of a target polynucleotide; a first binding site region capable of binding to a cleaved or nicked strand of the target polynucleotide; and a RT template sequence encoding a first extended sequence; a second ωRNA molecule capable of forming a second TnpB-Reverse transcriptase complex with the TnpB protein and comprising: a ωRNA sequence capable of directing site specific binding of the second TnpB-Reverse transcriptase complex to a second target sequence of the target polynucleotide; a second binding site region capable of binding to a cleaved or nicked strand of the target polynucleotide; and a RT template sequence encoding a second extended sequence.

[0186] In some cases, the compositions and systems may further comprise: a donor template; a third ωRNA sequence capable of forming a TnpB-Reverse transcriptase complex-ωRNA with the TnpB protein and comprising: a ωRNA sequence capable of directing site-specific binding to a target sequence on the donor template; a third binding region capable of binding to a cleaved or nicked strand of the donor template; and a RT template encoding a third extended region complementary to the first extended region generated on the target polynucleotide; and a fourth ωRNA sequence capable of forming a TnpB-Reverse transcriptase complex with the TnpB protein and comprising: a ωRNA sequence capable of directing site-specific binding to a second target sequence on the donor template; a fourth binding region capable of binding to a cleaved or nicked strand of the donor template; and a RT template encoding a fourth extended region complementary to the second extended region generated on the target polynucleotide.

[0187] Advantageously, the more open configuration of the TnpB complex relative to a CRISPR-Cas enzyme can allow for improved accessibility not only for a sequence complementary to the target site, but also for the RT template sequence and the reverse transcriptase, which may increase the editing efficiency at the target site. Additionally, the more minimal size of the TnpB allows for increased packaging efficiency for delivery with the reverse transcriptase, accessibility for deliver of additional ωRNA sequences, as detailed further below, all of which may further improvide editing efficiencies.

[0188] The compositions and systems may further comprise a site-specific recombinase, and wherein the first and second extended regions are complementary to each other and introduce a serine integrase recombination site; and a donor molecule comprising a donor sequence for insertion into the target polypeptide and the complementary recombination site to the serine integrase recombination site.

[0189] The compositions and systems may further comprise a recombinase. The recombinase is connected to or otherwise capable of forming a complex with the TnpB protein. In one embodiment, the complex is capable of inserting a recombination site in the DNA loci of interest by extension of RT templates that encode for the recombination site on the 3′ extension of the ωRNA sequences by the reverse transcriptase. In one embodiment, a donor template comprising a compatible recombination site is provided that can recombine unidirectionally with the inserted recombination site when a recombinase specific for the recombination site is also provided. In one embodiment, the donor template is a plasmid comprising the complementary recombination site and any sequence for insertion at the DNA loci of interest. In one embodiment, the recombinase is connected to or capable of forming a complex with the TnpB enzyme, such that all of the enzymatic proteins are brought into contact at the loci of interest. In one embodiment, the recombinase is codon optimized for eukaryotic cells (described further herein). In one embodiment, the recombinase includes a NIS (described further herein). In one embodiment, the recombinase is provided as a separate protein. The separate recombinase may form a dimer and bind to the donor template recombination site. The recombinase may be targeted to the loci of interest as a result of the insertion of the compatible recombination site that is also recognized by the recombinase. Thus, the recombinase may recognize the recombination site inserted at the DNA loci of interest and the recombination site on the donor and be targeted to the DNA loci of interest without any additional modifications to the recombinase.

[0190] In one embodiment, a second TnpB complex connected to a recombinase is targeted to the DNA loci of interest. In one embodiment, the second TnpB complex comprises a dead TnpB protein (dTnpB, described further herein), such that the recombinase is targeted to the DNA loci of interest, but the target sequence is not further cleaved. In one embodiment, the dTnpB targets a sequence generated only after the insertion of the recombination site. In one embodiment, the recombinase recognizes and binds to the donor template recombination site and the inserted recombination site. In one embodiment, the recombinase forms a dimer with a recombinase provided as a separate protein.

[0191] As used herein, the term “Recombinase” refers to an enzyme that catalyzes recombination between two or more recombination sites (e.g., an acceptor and donor site). Recombinases useful in the present invention catalyze recombination at specific recombination sites which are specific polynucleotide sequences that are recognized by a particular recombinase. “Uni-directional recombinases” or “integrases” refer to recombinase enzymes whose recognition sites are destroyed after the recombination has taken place. The term “integrase” refers to a type of recombinase. In other words, the sequence recognized by the recombinase is changed into one that is not recognized by the recombinase upon recombination. As a result, once a sequence is subjected to recombination by the uni-directional recombinase, the continued presence of the recombinase cannot reverse the previous recombination event.

[0192] “Recombination sites” are specific polynucleotide sequences that are recognized by the recombinase enzymes described herein. Typically, two different sites are involved (in regards to recombination termed “complementary sites”), one present in the target nucleic acid (e.g., a chromosome or episome of a eukaryote) and another on the nucleic acid that is to be integrated at the target recombination site. The terms “attB” and “attP,” which refer to attachment (or recombination) sites originally from a bacterial target (attachment site of bacteria) and a phage donor (attachment site of phage), respectively, are used herein although recombination sites for particular enzymes may have different names. The two attachment sites can share as little sequence identity as a few base pairs. The recombination sites typically include left and right arms separated by a core or spacer region. Thus, an attB recombination site consists of BOB′, where B and B′ are the left and right arms, respectively, and O is the core region. Similarly, attP is POP′, where P and P′ are the arms and O is again the core region. Upon recombination between the attB and attP sites, and concomitant integration of a nucleic acid at the target, the recombination sites that flank the integrated DNA are referred to as “attL” and “aatR.” The attL and attR sites, using the terminology above, thus consist of BOP′ and POB′, respectively. In some representations herein, the “O” is omitted and attB and attP, for example, are designated as BB′ and PP′, respectively.

### TnpB-Associated Transposase Systems

[0193] The systems and compositions herein may comprise a TnpB, one or more nucleic acid components, and one or more components of a transposase. In one example embodiment, the TnpB mediates RNA-guided TnpA-catalyzed transposition. In one-example embodiment, TnpB mediate RNA-guided Tn7-catalyzed transposition.

[0194] In an example embodiment, the transposases may comprise TnpA. The transposase may be a Y1 transposase of the IS200/IS605 family, encoded by the insertion sequence (IS) IS608 from Helicobacter pylori, e.g., TnpAIS608, from Deinococcus radiodurans, e.g., ISDra2, from Halanaerobium hydrogeniformans or from Sulfolobus solfataricus. Examples of the transposases include those described in Barabas, O., Ronning, D. R., Guynet, C., Hickman, A. B., TonHoang, B., Chandler, M. and Dyda, F. (2008) Mechanism of IS200/IS605 family DNA transposases: activation and transposon-directed target site selection. Cell, 132, 208-220; in Sadler et al., Genes 2020, 11, 484, doi: 10.3390/genes11050484, and in He et al., (2013) NAR, 41:5, 3302-3313. In certain example embodiments, the transposase is a single stranded DNA transposase. In certain example embodiments, the single stranded DNA transposase is TnpA or a functional fragment thereof. In an aspect, the TnpA motif used for homing to an insertion site is at least 50%, 75% or 100% complementary to the TAM of the TnpB, such that TnpA catalyzed transposition may occur at or near the TAM portion of the sequence.

[0195] In some examples, the one or more transposases or transposase sub-units are, or are derived from, Tn7 transposases. In a particular embodiment, the Tn7 or TN7-like transposase may be a Tn5053 transposase. For example, the Tn5053 transposases include those described in Minakhina S et al., Tn5053 family transposons are res site hunters sensing plasmidal res sites occupied by cognate resolvases. Mol Microbiol. 1999 September; 33(5):1059-68; and FIG. 4 and related texts in Partridge S R et al., Mobile Genetic Elements Associated with Antimicrobial Resistance, Clin Microbiol Rev. 2018 Aug. 1; 31(4), both of which are incorporated by reference herein in their entirety. In some cases, the one or more Tn5053 transposases may comprise one or more of TniA, TniB, and TniQ. TniA is also known as TnsB. TniB is also known as TnsC. TniQ is also known as TnsD. Accordingly, in one embodiment these Tn5053 transposase subunits may be referred to as TnsB, TnsC, and TnsD, respectively. In certain cases, the one or more transposases may comprise TnsB, TnsC, and TnsD.

[0196] In one embodiment, the transposases may be one or more Vibrio cholerae Tn6677 transposases. In one example, the transposon may include a terminal operon comprising the tnsA, tnsB, and tnsC genes. The transposon may further comprise a tniQ gene. In one embodiment, the TnsE may be absent in the transposon.

[0197] In certain examples, the transposase include one or more of Mu-transposase, TniQ, TniB, or functional domains thereof. In certain examples, the transposase include one or more of TniQ, a TniB, a TnpB, or functional domains thereof. In certain examples, the transposase includes one or more of a rve integrase, TniQ, TniB, or functional domains thereof.

[0198] In one embodiment the system, more particularly the transposase does not include an rve integrase. In one embodiment the system, more particularly the transposase does not include one or more of Mu-transposase, TniQ, a TniB, a TnpB, a IstB domain or functional domains thereof.

[0199] In certain examples, the transposase includes one or more of Mu-transposase, TniQ, TniB, or functional domains thereof. In certain examples, the transposase includes one or more of TniQ, a TniB, a TnpB, or functional domains thereof. In certain examples, the transposase includes one or more of a rve integrase, TniQ, TniB, TnpB domain, or functional domains thereof.

[0200] A right end sequence element or a left end sequence element are made in reference to an example Tn7 transposon. The general structure of the left end (LE) and right end (RE) sequence elements of canonical Tn7 is established. Tn7 ends comprise a series of 22-bp TnsB-binding sites. Flanking the most distal TnsB-binding sites is an 8-bp terminal sequence ending with 5′-TGT-3′/3′-ACA-5′. The right end of Tn7 contains four overlapping TnsB-binding sites in the ˜90-bp right end element. The left end contains three TnsB-binding sites dispersed in the ˜150-bp left end of the element. The number and distribution of TnsB-binding sites can vary among Tn7-like elements. End sequences of Tn7-related elements can be determined by identifying the directly repeated 5-bp target site duplication, the terminal 8-bp sequence, and 22-bp TnsB-binding sites (Peters J E et al., 2017). Example Tn7 elements, including right end sequence element and left end sequence element include those described in Parks A R, Plasmid, 2009 January; 61(1):1-14.

### TnpB Recombinase/Integrase Systems

[0201] The systems and compositions herein may comprise a TnpB system, and one or more components of a recombinase or integrase. In an aspect, the TnpB is naturally catalytically inactive and utilized with one or more nucleic acid components to provide site-specific targetings, and the one or more components of the recombinase to introduce a modification. In an aspect, the TnpB polypeptide may be catalytically inactivated via mutation of one or more residues of a catalytic domain (e.g., RuvC) or via truncation, and utilized with one or more nucleic acid components to provide site-specific targeting, and the one or more components of the recombinase introduce a modification. In one embodiment, a naturally inactive TnpB is provided with a recombinase, e.g., an integrase, and optionally a reverse transcriptase. The systems and compositions herein may comprise a TnpB polypeptide, one or more nucleic acid components, and one or more components of an integrase. In an aspect, the TnpB polypeptide is a nickase, and utilized with one or more nucleic acid components to provide site-specific targeting, with the one or more components of the integrase introduce a modification. The systems and compositions may be used to insert a donor polynucleotide to a target polynucleotide. The systems and compositions may further comprise a donor polynucleotide.

[0202] In one embodiment, the recombinase mediates unidirectional site-specific recombination. In one embodiment, the recombinase is a serine recombinase (SR) also referred to as a serine integrase, encoded, for example, by IS607 family, Tn4451, and bacteriophage phiC31. See, generally, Smith M C, Thorpe H M: Diversity in the serine recombinases. Mol Microbiol. 2002, 44:299-307. 10.1046/j.1365-2958.2002.02891.x; Li et al., (2018) J. Mol. Biol. 430:21, 4401-4418.

[0203] In an embodiment, the recombinase is a tyrosine recombinase (YR) encoded by IS91, Helitron, IS200/IS605, Crypton or DIRS-retrotransposon families. See, generally, Goodwin T J, Butler M I, Poulter T: Cryptons: a group of tyrosine-recombinase-encoding DNA transposons from pathogenic fungi. Microbiology. 2003, 149:3099-3109. Doi:10.1099/mic.0.26529-0; Cappello J, Handelsman K, Lodish H F: Sequence of Dictyostelium DIRS-1: an apparent retrotransposon with inverted terminal repeats and an internal circle junction sequence. Cell. 1985, 43:105-115. 10.1016/0092-8674(85)90016-9.

[0204] In an aspect, the recombinase provides site-specific integration of a template that can be provided with the composition, e.g., a donor oligonucleotide. Without being bound by theory, the recombinase allows for integration independent of payload size and can coordinate strand exchange and re-ligation across multiple cell types, allowing integration of long stretches of polynucleotides. In an exemplary embodiment, the serine recombinase is PhiC31 and the target is DNA. In an aspect, the phiC31 allows for integration of a target site comprising an attP or pseudoattP recognition site. See, e.g., systembio.com/wp-content/uploads/phiC31_productsheet-1.pdf. In an embodiment utilizing phiC231, a donor oligonucleotide would be provided with an attB at sequence that facilitates attachment at the attP site of the target genome. Similar approaches of designing donor oligonucleotides with sequences complementary to attachment sites for a recombinase can be designed for use with the present invention. See, e.g., Li et al., (2018) J. Mol. Biol. 430:21, 4401-4418.

[0205] In one embodiment, the integrase mediates gene integration at diverse loci by directing insertion with an TnpB nickase fused to both a reverse transcriptase and an integrase. In one embodiment, the integrase is a serine integrase, encoded, for example, BxbINT. See, generally, Ioannidi et al., “Drag-and-drop genome insertion without DNA cleavage with CRISPR-directed integrases”; doi:10.1101/2021.11.01.466786m incorporated herein by reference in its entirety. In Ioannidi, Gootenberg, Abudayyeh, and colleagues show integration using a CRISPR-Cas9 nickase fused to a reverse transcriptase and serine integrase termed Programmable Addition via Site-specific Targeting Elements (PASTE) with delivery via a single dose of plasmids with functionality in non-dividing and primary cells, utilizing a guide RNA comprising an AttB landing site, termed attachment site-containing guide RNA were used to insert sequences, including diverse cargo sequences that can be inserted across different loci, varying in size up to about 36 kb. Additional uses of the PASTE system included gene tagging, gene replacement, gene delivery, and protein production and secretion, approaches that are contemplated for use with the TnpB nickase and integrase approach. In an aspect, the omega RNA may comprise an AttB landing site. In an aspect, the recombinase provides site-specific integration of a template that can be provided with the composition, e.g., a donor oligonucleotide.

[0206] Additional large serine integrases can be used with the TnpB polypeptide, for example, as identified and described in Durrant et al., Large-scale discovery of recombinases for integrating DNA into the human genome, doi:10.1101/2021.11.05.467528, incorporated herein by reference. Other integrases include BceINT, SscINT, SacINT. See, Ioannidi, 2021 at and FIG. 6d, and FIG. 10a.

[0207] Without being bound by theory, the recombinase allows for integration independent of payload size and can coordinate strand exchange and re-ligation across multiple cell types, allowing integration of long stretches of polynucleotides. In an exemplary embodiment, the integrase is BxbINT and the target is DNA. In an aspect, the BxbINT allows for integration of a target site comprising an attP or pseudoattP recognition site. In an embodiment utilizing BxbINT, a donor oligonucleotide would be provided with an attB at sequence that facilitates attachment at the attP site of the target genome. Similar approaches of designing donor oligonucleotides with sequences complementary to attachment sites for an integrase can be designed for use with the present invention, for example a circular double-strand DNA template containing the AttP attachment site, or delivery of large cargo via an adenovirus or other viral vector, as described elsewhere herein. See, e.g., Ioannidi et al., 2021 at FIG. 1a, 1b and 5b.

### TnpB Topoisomerase Systems

[0208] The one or more functional domains may be one or more topoisomerase domains. Topoisomerases are a class of enzymes that modify the topological state of DNA via the breakage and rejoining of nucleic acid strands. In some cases, a topoisomerase may be a DNA topoisomerase, which is an enzyme that controls and alters the topologic states of DNA during transcription and catalyzes the transient breaking and rejoining of a single strand of DNA which allows the strands to pass through one another, thus altering the topology of DNA.

[0209] In one embodiment, the topoisomerase domain is capable of ligating the donor polynucleotide with the target polynucleotide. The ligation may be achieved by sticky end or blunt end ligation. In an example, a donor polynucleotide may comprise an overhang comprising a sequence complementary to a region of the target polynucleotide. Examples of ligating the donor polynucleotide with the target polynucleotide include those of TOPO cloning, e.g., those described in “The Technology Behind TOPO Cloning,” at www.thermofisher.com/us/en/home/life-science/cloning/topo/topo-resources/the-technology-behind-topo-cloning.html.

[0210] In one embodiment, the topoisomerase domain may be associated with a donor polynucleotide. For example, the topoisomerase domain is covalently linked to a donor polynucleotide. In one embodiment, a topoisomerase domain may be provided together with, e.g., associated (e.g., fused) with a TnpB or a variant thereof.

[0211] Alternatively or additionally, the topoisomerase domain may be on a molecule different from TnpB polypeptide. In some cases, the topoisomerase domain may be associated with a donor polynucleotide. For example, the topoisomerase domain may be pre-loaded covalently with a donor DNA molecule. Such deign may allow for efficient ligation of only a specific cargo. The topoisomerase domain may ligate the donor polynucleotide (e.g., a DNA molecule) to a target site on a target polynucleotide (e.g., a free double-stranded DNA end). In one embodiment, the donor polynucleotide may have an overhang that comprises a sequence complementary to a region of the target polynucleotide. For example, the overhang may invade into the target polynucleotide at a cut site generated by the tnpB polypeptide.

[0212] Examples of topoisomerases include type I, including type IA and type IB topoisomerases, which cleave a single strand of a double-stranded nucleic acid molecule, and type II topoisomerases (e.g., gyrases), which cleave both strands of a double-stranded nucleic acid molecule.

[0213] Type IA and IB topoisomerases cleave one strand of a double-stranded nucleic acid molecule. In some examples, the cleavage of a double-stranded nucleic acid molecule by type IA topoisomerases generates a 5′ phosphate and a 3′ hydroxyl at the cleavage site, with the type IA topoisomerase covalently binding to the 5′ terminus of a cleaved strand. Cleavage of a double-stranded nucleic acid molecule by type IB topoisomerases may generate a 3′ phosphate and a 5′ hydroxyl at the cleavage site, with the type IB topoisomerase covalently binding to the 3′ terminus of a cleaved strand.

[0214] Examples of Type IA topoisomerases include E. coli topoisomerase I, E. coli topoisomerase III, eukaryotic topoisomerase II, archeal reverse gyrase, yeast topoisomerase III, Drosophila topoisomerase III, human topoisomerase III, Streptococcus pneumoniae topoisomerase III, and the like, including other type IA topoisomerases. A DNA-protein adduct is formed with the enzyme covalently binding to the 5′-thymidine residue, with cleavage occurring between the two thymidine residues.

[0215] Examples of Type IB topoisomerases include the nuclear type I topoisomerases present in all eukaryotic cells and those encoded by Vaccinia and other cellular poxviruses. The eukaryotic type IB topoisomerases are exemplified by those expressed in yeast, Drosophila and mammalian cells, including human cells. Viral type IB topoisomerases are exemplified by those produced by the vertebrate poxviruses (Vaccinia, Shope fibroma virus, ORF virus, fowlpox virus, and molluscum contagiosum virus), and the insect poxvirus (Amsacta moorei entomopoxvirus).

[0216] Examples of Type II topoisomerases include, bacterial gyrase, bacterial DNA topoisomerase IV, eukaryotic DNA topoisomerase II, and T-even phage encoded DNA topoisomerases. Type II topoisomerases may have both cleaving and ligating activities. Substrate double-stranded nucleic acid molecules of type II topoisomerase can be prepared such that the type II topoisomerase can form a covalent linkage to one strand at a cleavage site. For example, calf thymus type II topoisomerase can cleave a substrate ds nucleic acid molecule containing a 5′ recessed topoisomerase recognition site positioned three nucleotides from the 5′ end, resulting in dissociation of the three nucleic acid molecule 5′ to the cleavage site and covalent binding of the topoisomerase to the 5′ terminus of the ds nucleic acid molecule. Furthermore, upon contacting such a type II topoisomerase-charged ds nucleic acid molecule with a second nucleic acid molecule containing a 3′ hydroxyl group, the type II topoisomerase can ligate the sequences together, and then is released from the recombinant nucleic acid molecule.

[0217] Structural analysis of topoisomerases indicates that the members of each particular topoisomerase families, including type IA, type IB and type II topoisomerases, share common structural features with other members of the family. In addition, sequence analysis of various type IB topoisomerases indicates that the structures are highly conserved, particularly in the catalytic domain. For example, a domain comprising amino acids 81 to 314 of the 314 amino acid Vaccinia topoisomerase shares substantial homology with other type IB topoisomerases, and the isolated domain has essentially the same activity as the full-length topoisomerase, although the isolated domain has a slower turnover rate and lower binding affinity to the recognition site. In addition, a mutant Vaccinia topoisomerase, which is mutated in the amino terminal domain (e.g., at amino acid residues 70 and 72) may display identical properties as the full-length topoisomerase. Mutation analysis of Vaccinia type IB topoisomerase reveals a large number of amino acid residues that can be mutated without affecting the activity of the topoisomerase and has identified several amino acids that are required for activity. In view of the high homology shared among the Vaccinia topoisomerase catalytic domain and the other type IB topoisomerases, and the detailed mutation analysis of Vaccinia topoisomerase, it will be recognized that isolated catalytic domains of the type IB topoisomerases and type IB topoisomerases having various amino acid mutations can be used in the methods of the invention and thus are considered to be topoisomerases for purposes of the present invention.

[0218] The various topoisomerases exhibit a range of sequence specificity. For example, type II topoisomerases can bind to a variety of sequences, but cleave at a highly specific recognition site. The type IB topoisomerases may include site specific topoisomerases, which bind to and cleave a specific nucleotide sequence (“topoisomerase recognition site”). Upon cleavage of a double-stranded nucleic acid molecule by a topoisomerase, for example, a type IB topoisomerase, the energy of the phosphodiester bond is conserved via the formation of a phosphotyrosyl linkage between a specific tyrosine residue in the topoisomerase and the 3′ nucleotide of the topoisomerase recognition site. Where the topoisomerase cleavage site is near the 3′ terminus of the nucleic acid molecule, the downstream sequence (3′ to the cleavage site) can dissociate, leaving a nucleic acid molecule having the topoisomerase covalently bound to the newly generated 3′ end.

[0219] The covalently bound topoisomerase also can catalyze the reverse reaction, for example, covalent linkage of the 3′ nucleotide of the recognition sequence, to which a type IB topoisomerase is linked through the phosphotyrosyl bond, and a nucleic acid molecule containing a free 5′ hydroxyl group. As such, methods have been developed for using a type IB topoisomerase to produce recombinant nucleic acid molecules. Nucleic acid molecules such as those comprising a cDNA library, or restriction fragments, or sheared genomic DNA sequences that are to be cloned into such a vector are treated, for example, with a phosphatase to produce 5′ hydroxyl termini, then are added to the linearized vector under conditions that allow the topoisomerase to ligate the nucleic acid molecules at the 5′ terminus containing the hydroxyl group and the 3′ terminus containing the covalently bound topoisomerase.

[0220] Examples of vaccinia viruses encode a 314 amino acid type I topoisomerase enzyme capable of site-specific single-strand nicking of double stranded DNA, as well as 5′ hydroxyl driven re-ligation. Site-specific type I topoisomerases include, but are not limited to, viral topoisomerases such as pox virus topoisomerase. Examples of pox virus topoisomerases include Shope fibroma virus and ORF virus. Other site-specific topoisomerases are well known to those skilled in the art and can be used to practice this invention.

[0221] Examples of vaccinia topoisomerase binds to duplex DNA and cleaves the phosphodiester backbone of one strand while exhibiting a high level of sequence specificity. Cleavage may occur at a consensus pentapyrimidine element 5′-(C/T)CCTT↓, or related sequences in the scissile strand. In one embodiment the scissile bond is situated in the range of 2 to 12 bp from the 3′ end of the duplex DNA. In another embodiment cleavable complex formation by Vaccinia topoisomerase requires six duplex nucleotides upstream and two nucleotides downstream of the cleavage site.

[0222] In some examples, the topoisomerase is DNA topoisomerase I, e.g., a Vaccinia virus topoisomerase I. The topoisomerase may be pre-loaded with a donor polynucleotide. The Vaccinia virus topoisomerase may need a target comprising a 5′—OH group.

### TnpB Guided Excision-Transposition Systems

[0223] Embodiments disclosed herein provide an engineered or non-natural guided excision-transposition system. The engineered or non-natural guided excision-transposition system may comprise one or more components of a ωRNA-TnpB system, e.g., an ωRNA scaffold and spacer and/or TnpB polypeptide, and one or more components of a Class II transposon. The components of the ωRNA-TnpB system can direct the Class II transposon component(s) to retrotransposon to a target nucleic acid sequence and direct its transposition into a recipient polynucleotide.

[0224] For example, the engineered or non-natural guided excision-transposition systems that can include (a) a first TnpB protein; (b) a first Class II transposon polypeptide coupled to or otherwise capable of complexing with the first TnpB protein; (c) a first guide molecule capable of forming a first ωRNA-TnpB complex with the first TnpB protein and directing site-specific binding to a first target sequence of a first target polynucleotide; (d) a second TnpB protein; (e) a second Class II transposon polypeptide coupled to or otherwise capable of complexing with the second TnpB protein; (f) a second guide molecule capable of forming a second ωRNA-TnpB complex with the first TnpB protein and directing site-specific binding to a second target sequence of the first target polynucleotide; and (g) a Class II transposon polynucleotide comprising the first target polynucleotide and is capable of forming a complex with the first and second TnpB protein, the first and second guide molecules, and the first and second Class II transposon polypeptides.

[0225] In some embodiments, the engineered or non-natural guided excision-transposition system can include (h) a third guide molecule capable of complexing with the first TnpB protein and directing site-specific binding to a first target sequence of a second target polynucleotide, wherein the third guide molecule is optionally coupled to the first TnpB protein; (i) optionally, a first guide molecule polynucleotide that encodes the third guide molecule; (j) a fourth guide molecule capable of complexing with the second TnpB protein and directing site-specific binding to a second target sequence of the second target polynucleotide, wherein the fourth guide molecule is optionally coupled to the second TnpB protein; and (k) optionally, a second guide molecule polynucleotide that encodes the fourth guide molecule.

[0226] In some embodiments, the first and the second Class II transposon polypeptides are capable of excising the first target polynucleotide from the Class II transposon polynucleotide. In some embodiments, the first and the second Class II transposon polypeptides are capable of transposing the first target polynucleotide in the second target polynucleotide. In some embodiments, the first target polynucleotide does not include one or more Class II transposon long terminal repeats.

[0227] The engineered or non-natural guided excision-transposition systems described herein can be based on a Class II transposon or Class II transposon system. The engineered or non-natural guided excision-transposition system may include a first target polynucleotide, also referred to as a donor polynucleotide or transposon and a second target polynucleotide, which is also referred to herein as a recipient polynucleotide. As used herein, “transposon” (also referred to as transposable element) refers to a polynucleotide sequence that is capable of moving form location in a genome to another. There are several classes of transposons. Transposons include retrotransposons (Class I transposons) and DNA transposons (Class II transposons). In some cases, retrotransposons require the transcription of the polynucleotide that is moved (or transposed) in order to transpose the polynucleotide to a new genome or polynucleotide. DNA transposons are those that do not require reverse transcription of the polynucleotide that is moved (or transposed) in order to transpose the polynucleotide to a new genome or polynucleotide.

[0228] Any suitable transposon system can be used. Suitable transposon and systems thereof can include, but are not limited, to Sleeping Beauty transposon system (Tcl/mariner superfamily) (see e.g., Ivics et al. 1997. Cell. 91(4): 501-510), piggyBac (piggyBac superfamily) (see e.g., Li et al. 2013 110(25): E2279-E2287 and Yusa et al. 2011. PNAS. 108(4): 1531-1536), Tol2 (superfamily hAT), Frog Prince (Tcl/mariner superfamily) (see e.g., Miskey et al. 2003 Nucleic Acid Res. 31(23):6873-6881) and variants thereof.

[0229] In some embodiments, the first and/or second Class II transposon polypeptide is a DD [E/D] transposon or transposon polypeptide. In some embodiments, the first and/or the second Class II transposon polynucleotide is a Tcl/mariner, PiggyBac, Frog Prince, Tn3, Tn5, hAT, CACTA, P, Mutator, PIF/Harbinger, Transib, or a Merlin/IS1016 transposon polynucleotide. In some embodiments, the first and/or second Class II transposon polypeptide is a Tcl/mariner, PiggyBac, Frog Prince, Tn3, Tn5, hAT, CACTA, P, Mutator, PIF/Harbinger, Transib, or a Merlin/IS1016 transposon polypeptide.

[0230] Suitable Class II transposon systems and components that can be utilized can also be and are not limited to those described in e.g., and without limitation, Han et al., 2013. BMC Genomics. 14:71, doi: 10.1186/1471-2164-14-71, Lopez and Garcia-Perez. 2010. Curr. Genomics. 11(2): 115-128; Wessler. 2006. PNAS. 103(47): 176000-17601; Gao et al., 2017. Marine Genomics. 34:67-77; Bradic et al. 2014. Mobile DNA. 5(12) doi:10.1186/1759-8753-5-12; Li et al., 2013. PNAS. 110(25)E2279-E2287; Kebriaei et al. 2017. Trends in Genetics. 33(11): 852-870); Miskey et al. 2003. Nucleic Acid res. 31(23):6873-6881; Nicolas et al. 2015. Microbiol Spectr. 3(4) doi: 10.1128/microbiolspec.MDNA3-0060-2014); W. S. Reznikoff. 1993. Annu Rev. Microbiol. 47:945-963; Rubin et al. 2001. Genetics. 158(3): 949-957; Wicker et al. 2003. Plant Physiol. 132(1): 52-63; Majumdar and Rio. 2015. Microbiol. Spectr. 3(2) doi: 10.1128/microbiolspec.MDNA3-0004-2014; D. Lisch. 2002. Trends in Plant Sci. 7(11): 498-504; Sinzelle et al. 2007. PNAS. 105(12): 4715-4720; Han et al. 2014; Genome Biol. Evol. 6(7): 1748-1757; Grzebelus et al. 2006; Mol. Genet. Genomics. 275(5):450-459; Zhang et al. 2004. Genetics. 166(2):971-986; Chen and Li. 2008. Gene. 408(1-2):51-63; and C. Feschotte. 2004. Mol. Biol. Evol. 21(9):1769-1780.

### TnpB Retrotransposon Systems

[0231] The systems and compositions herein may comprise a TnpB, one or more nucleic acid components, and one or more components of a retrotransposon, e.g., a non-LTR retrotransposon. The one or more components of a retrotransposon include a retrotransposon protein and retrotransposon RNA. The systems and compositions may be used to insert a donor polynucleotide to a target polynucleotide. The systems and compositions may further comprise a donor polynucleotide.

[0232] In some examples, the present disclosure provides an engineered, non-naturally occurring composition comprising: a TnpB polypeptide, a non-LTR retrotransposon protein associated with or otherwise capable of forming a complex with the TnpB polypeptide; a single nucleic acid component capable of forming a complex with the TnpB polypeptide and directing site-specific binding to a target sequence of a target polynucleotide. The composition may further comprise a donor construct comprising a donor polynucleotide for insertion to the target polynucleotide and located between two binding elements capable of forming a complex with the non-LTR retrotransposon protein. In some cases, the TnpB polypeptide is engineered to have nickase activity.

[0233] In some examples, the TnpB polypeptide is fused to the N-terminus of the non-LTR retrotransposon protein. In some examples, the TnpB polypeptide is fused to the C-terminus of the non-LTR retrotransposon protein.

[0234] The nucleic acid component molecule s may direct the fusion protein to a target sequence 5′ of the targeted insertion site, and wherein the TnpB polypeptide generates a double-strand break at the targeted insertion site. The nucleic acid component molecule s may direct the fusion protein to a target sequence 3′ of the targeted insertion site, and wherein the TnpB polypeptide generates a double-strand break at the targeted insertion site.

[0235] The donor polynucleotide may further comprise a polymerase processing element to facilitate 3′ end processing of the donor polynucleotide sequence. The polymerase may be a DNA polymerase, e.g., DNA polymerase I. In some examples, the polymerase may be an RNA polymerase.

[0236] In some examples, the donor polynucleotide further comprises a homology region to the target sequence on the 5′ end of the donor construct, the 3′ end of the donor construct, or both. In some examples, the homology region is from 1 to 50, from 5 to 30, from 8 to 25, e.g., 1, 2, 3, 4, 5, 6, 7, 8, 9, 10, 11, 12, 13, 14, 15, 16, 17, 18, 19, 20, 21, 22, 23, 24, 25, 26, 27, 28, 29, 30, 31, 32, 33, 34, 35, 36, 37, 38, 39, 40, 41, 42, 43, 44, 45, 46, 47, 48, 49, or 50 base pairs in length.

[0237] Native or wild-type non-LTR retrotransposons encode the protein machinery necessary for their self-mobilization. The non-LTR retrotransposon element comprises a DNA element integrated into a host genome. This DNA element may encode one or two open reading frames (ORFs). For example, the R2 element of Bombyx mori encodes a single ORF containing reverse transcriptase (RT) activity and a restriction enzyme-like (REL) domain. L1 elements encode two ORFs, ORF1 and ORF2. ORF1 contains a leucine zipper domain involved in protein-protein interactions and a C-terminal nucleic acid binding domain. ORF2 has a N-terminal apurinic/apyrimidinic endonuclease (APE), a central RT domain, and a C-terminal cysteine histidine rich domain. An example replicative cycle of a non-LTR retrotransposon may comprise transcription of the full-length retrotransposon element to generate an mRNA active element (retrotransposon RNA). The active element mRNA is translated to generate the encoded retrotransposon proteins or polypeptides. A ribonucleoprotein complex comprising the active element and retrotransposon protein or polypeptide is formed and this RNP facilitates integration of the active element into the genome. The RNA-transposase complex nicks the genome. The 3′ end of the nicked DNA serves as a primer to allow the reverse transcription of the transposon RNA into cDNA. Fourth, the transposase proteins integrate the cDNA into the genome.

[0238] Elements of these systems may be engineered to work within the context of the invention. For example, a non-LTR retrotransposon polypeptide may be fused to a site-specific nuclease. The binding elements that allow a non-LTR retrotransposon polypeptide to bind to the native retrotransposon DNA element, may be engineered into a donor construct to facilitate entry of a donor polynucleotide sequence into a target polypeptide.

[0239] In the present invention, the protein component of the non-LTR retrotransposon may be connected to or otherwise engineered to form a complex with a site-specific nuclease, e.g., TnpB polypeptide. The retrotransposon RNA may be engineered to encode a donor polynucleotide sequence. Thus, in certain example embodiments, the TnpB polypeptide, via formation of a TnpB polypeptide complex with a nucleic acid component molecule sequence, directs the retrotransposon complex (e.g., the retrotransposon polypeptide(s) and retrotransposon RNA to a target sequence in a target polynucleotide, where the retrotransposon RNP complex facilitates integration of the donor polynucleotide sequence into the target polynucleotide. Accordingly, the one or more non-LTR retrotransposon components may comprise retrotransposon polypeptides, or function domains thereof, that facilitate binding of the retrotransposon RNA, reverse transcription of the retrotransposon RNA into cDNA, and/or integration of the donor polynucleotide into the target polynucleotide, as well as retrotransposon RNA elements modified to encode the donor polynucleotide sequence.

[0240] Examples non-LTR retrotransposons include CRE, R2, R4, L1, RTE, Tad, R1, LOA, I, Jockey, CR1. In one example, the non-LTR retrotransposon is R2. In another example, the non-LTR retrotransposon is L1. Examples of non-LTR retrotransposons may include those described in Christensen S M et al., RNA from the 5′ end of the R2 retrotransposon controls R2 protein binding to and cleavage of its DNA target site, Proc Natl Acad Sci USA. 2006 Nov. 21; 103(47):17602-7; Eickbush T H et al, Integration, Regulation, and Long-Term Stability of R2 Retrotransposons, Microbiol Spectr. 2015 April; 3(2):MDNA3-0011-2014. doi: 10.1128/microbiolspec.MDNA3-0011-2014; Han J S, Non-long terminal repeat (non-LTR) retrotransposons: mechanisms, recent developments, and unanswered questions, Mob DNA. 2010 May 12; 1(1):15. doi: 10.1186/1759-8753-1-15; Malik H S et al., The age and evolution of non-LTR retrotransposable elements, Mol Biol Evol. 1999 June; 16(6):793-805, which are incorporated by reference herein in their entireties.

[0241] Examples of the non-LTR retrotransposon polypeptides also include R2 from Clonorchis sinensis, or Zonotrichia albicollis.

[0242] A non-LTR retrotransposon may comprise multiple retrotransposon polypeptides or polynucleotides encoding same. In one embodiment, the retrotransposon polypeptides may form a complex. For example, a non-LTR retrotransposon is a dimer, e.g., comprising two retrotransposon polypeptides forming a dimer. The dimer subunits may be connected or form a tandem fusion. A TnpB polypeptide may be associate with (e.g., connected to) one or more subunits of such complex. In some examples, the non-LTR retrotransposon is a dimer of two retrotransposon polypeptides; one of the retrotransposon polypeptides comprises nuclease or nickase activity and is connected with a TnpB polypeptide.

[0243] The retrotransposon polypeptides may comprise one or more modifications to, for example, enhance specificity or efficiency of donor polynucleotide recognition, target-primed template recognition (TPTR). The retrotransposon polypeptides may also comprise one or more truncations or excisions to remove domains or regions of wild-type protein to arrive at a minimal polypeptide that retain donor polynucleotide recognition and TPTR. In some example embodiments, the native endonuclease activity may be mutated to eliminate endonuclease activity.

[0244] In certain example embodiments, the modifications or truncations of the non-LTR retrotransposon peptide may be in a zinc finger region, a Myb region, a basic region, a reverse transcriptase domain, a cysteine-histidine rich motif, or an endonuclease domain.

[0245] A non-LTR retrotransposon may comprise polynucleotide encoding one or more retrotransposon RNA molecules. The polynucleotide may comprise one or more regulatory elements. The regulatory elements may be promoters. The regulatory elements and promoters on the polynucleotides include those described throughout this application. For example, the polynucleotide may comprise a pol2 promoter, a pol3 promoter, or a T7 promoter.

[0246] In some cases, the polynucleotide encodes a retrotransposon RNA with at least a portion of its sequence complementary to a target sequence. For example, the 3′ end of the retrotransposon RNA may be complementary to a target sequence. The RNA may be complementary to a portion of a nicked target sequence. In one embodiment, a retrotransposon RNA may comprise one or more donor polynucleotides. In certain cases, a retrotransposon RNA may encode one or more donor polynucleotides.

[0247] A retrotransposon RNA may be capable of binding to a retrotransposon polypeptide. Such retrotransposon RNA may comprise one or more elements for binding to the retrotransposon polypeptide. Examples of binding elements include hairpin structures, pseudoknots (e.g., a nucleic acid secondary structure containing at least two stem-loop structures in which half of one stem is intercalated between the two halves of another stem), stem loops, and bulges (e.g., unpaired stretches of nucleotides located within one strand of a nucleic acid duplex). In certain examples, the retrotransposon RNA comprises one or more hairpin structures. In some examples, the retrotransposon RNA comprises one or more pseudoknots. In certain examples, a retrotransposon RNA comprises a sequence encoding a donor polynucleotide and one or more binding elements for forming a complex with the retrotransposon polypeptide. The binding elements may be located on the 5′ end or the 3′ end.

[0248] In one embodiment, a retrotransposon RNA comprises a region capable of hybridizing with an overhang of a target polynucleotide at the target site. The overhang may be a stretch of single-stranded DNA. The overhang may function as a primer for reverse transcription of at least a portion of the retrotransposon RNA to a cDNA. In some cases, a region of the cDNA may be capable of hybridizing a second overhang of the target polynucleotide. The second overhang may function as a primer for the synthesis of a second strand to generate a double-stranded cDNA. The cDNA may comprise a donor polynucleotide sequence. The two overhangs may be from different strands of the target polynucleotide.

### Reverse Transcriptase Domain

[0249] The one or more functional domains may be one or more reverse transcriptase domains. In some embodiments, the systems comprise an engineered system for modifying a target polynucleotide comprising: a TnpB protein or a variant thereof (e.g., dTnpB); a reverse transcriptase (RT) domain; a RNA template comprising or encoding a donor polynucleotide to be inserted to a target sequence of the target polynucleotide; and an ωRNA molecule (i.e., a naturally single guide RNA molecule comprising a scaffold for reprogamming).

[0250] The reverse transcriptase may generate single-strand DNA based on the RNA template. The single-strand DNA may be generated by a non-retron, retron, or diversity generating retroelement (DGR). In some examples, the single-strand DNA may be generated from a self-priming RNA template. A self-priming RNA template may be used to generate a DNA without the need of a separate primer.

[0251] A reverse transcriptase domain may be a reverse transcriptase or a fragment thereof. A wide variety of reverse transcriptases (RT) may be used in alternative embodiments of the present invention, including prokaryotic and eukaryotic RT, provided that the RT functions within the host to generate a donor polynucleotide sequence from the RNA template. If desired, the nucleotide sequence of a native RT may be modified, for example using known codon optimization techniques, so that expression within the desired host is optimized. A reverse transcriptase (RT) is an enzyme used to generate complementary DNA (cDNA) from an RNA template, a process termed reverse transcription. Reverse transcriptases are used by retroviruses to replicate their genomes, by retrotransposon mobile genetic elements to proliferate within the host genome, by eukaryotic cells to extend the telomeres at the ends of their linear chromosomes, and by some non-retroviruses such as the hepatitis B virus, a member of the Hepadnaviridae, which are dsDNA-RT viruses. Retroviral RT has three sequential biochemical activities: RNA-dependent DNA polymerase activity, ribonuclease H, and DNA-dependent DNA polymerase activity. Collectively, these activities enable the enzyme to convert single-stranded RNA into double-stranded cDNA. In one embodiment, the RT domain of a reverse transcriptase is used in the present invention. The domain may include only the RNA-dependent DNA polymerase activity. In some examples, the RT domain is non-mutagenic, i.e., does not cause mutation in the donor polynucleotide (e.g., during the reverse transcriptase process). In some examples, the RT domain may be non-retron RT, e.g., a viral RT or a human endogenous RT. In some examples, the RT domain may be retron RT or DGRs RT. In some examples, the RT may be less mutagenic than a counterpart wildtype RT. In some embodiments, the RT herein is not mutagenic.

### Retrons

[0252] In one embodiment, a donor template for homologous recombination is generated by use of a self-priming RNA template for reverse transcription. A non-limiting example of a self-priming reverse transcription system is the retron system. By the term “retron” it is meant a genetic element which encodes components enabling the synthesis of branched RNA-linked single stranded DNA (msDNA) and a reverse transcriptase. Retrons which encode msDNA are known in the art, for example, but not limited to U.S. Pat. Nos. 6,017,737; 5,849,563; 5,780,269; 5,436,141; 5,405,775; 5,320,958; CA 2,075,515; all of which are herein incorporated by reference.

[0253] In one embodiment, the reverse transcriptase domain is a retron RT domain. In one embodiment, the RNA template encodes a retron RNA template that is recognized and reverse transcribed by the retron reverse transcriptase domain. Conserved across many bacterial species, retrons are highly efficient reverse transcription systems of relatively unknown function. The retron system consists of the retron RT protein, as well as the msr and msd transcripts, which function as the primer and template sequences, respectively. All components of the retron system are expressed from a single open reading frame as a single transcript including the msr-msd and encoding the retron RT protein (Lampson, et al., 2005, Retrons, msDNA, and the bacterial genome. Cytogenet Genome Res 110:491 499). The msr element ORF of a retron provides for the RNA portion of the msDNA molecule, while the msd element ORF provides for the DNA portion of the msDNA molecule. The primary transcript from the msr-msd region is thought to serve as both a template and a primer to produce the msDNA. Synthesis of msDNA is primed from an internal rG residue of the RNA transcript using its 2′—OH group. Modification of msd, or msr may also be made to permit insertion of a RNA template encoding a donor polynucleotide within the msd without altering the functioning of or the production of msDNA. The RNA template encoding a donor polynucleotide sequence may be any length but is preferably less than about 5 kb nucleotides, or also less than about 2 kb, or also less than 500 bases, provided that an msDNA product is produced.

### TnpB Diversity Generating Retroelement Systems

[0254] In one embodiment, the one or more functional domains may be a diversity generating retroelement(s) (e.g., DGR described in US20100041033A1). In some embodiments, the DGR may insert a donor polynucleotide with its homing mechanism. For example, the DGR may be associated with a catalytically inactive TnpB protein (e.g., a dead TnpB), and integrate the single-strand DNA using a homing mechanism. In some examples, the DGR may be less mutagenic than a counterpart wild type DGR. In some examples, the DGR is not error-prone. In some embodiments, the DGR herein is not mutagenic. The non-mutagenic DGR may be a mutant of a wild type DGR. As used herein, the term “DGR” encompasses both diversity generating retroelement polynucleotides and proteins encoded by diversity generating retroelement polynucleotides. In some examples, DGR may be proteins encoded by diversity generating retroelement polynucleotides having reverse transcriptase activity. In some examples, DGR may be proteins encoded by diversity generating retroelement polynucleotides having reverse transcriptase activity and integrase activity. In some cases, the template or donor polynucleotide may be encoded by a diversity generating retroelement polynucleotide. In certain cases, the template may be a polynucleotide different from the diversity generating retroelement polynucleotide, e.g., provided as a separate construct or molecule.

[0255] In some embodiments, the DGR herein may also include a Group II intron (and any proteins and polynucleotides encoded), which are mobile ribozymes that self-splice from precursor RNAs to yield excised intron lariat RNAs, which then invade new genomic DNA sites by reverse splicing. Examples of Group II intron include those described in Lambowitz A M et al., Group II Introns: Mobile Ribozymes that Invade DNA, Cold Spring Harb Perspect Biol. 2011 August; 3(8): a003616.

[0256] In some embodiments, the diversity-generating retroelements (DGRs) are genetic elements that can produce targeted, massive variations in the genomes that carry these elements. In some embodiments, the DGR systems rely on error-prone reverse transcriptases to produce mutagenized cDNA (containing A-to-N mutations) from a template region (TR), to replace a segment called a variable region (VR) that is similar to the TR region—this process is called mutagenic retrohoming (see, e.g., Sharifi and Ye, MyDGR: a server for identification and characterization of diversity-generating retroelements. Nucleic Acids Res. 2019 Jul. 2; 47(W1): W289-W294). DGRs may include a unique family of retroelements that generate sequence diversity of DNA. They exist widely in bacteria, archaea, phage and plasmid, and benefit their hosts by introducing variations and accelerating the evolution of target proteins (see, e.g., Yan et al., Discovery and characterization of the evolution, variation and functions of diversity-generating retroelements using thousands of genomes and metagenomes. BMC Genomics. 2019; 20:595). The first DGR was discovered in a Bordetella phage, BPP-1. Bordetella causes the respiratory infection in humans and many other mammals, controlled by the BvgAS signal transduction system. The surface of Bordetella is highly variable owing to the dynamic gene expression in the infectious cycle. The invasion of BPP-1 to Bordetella relies on the phage tail fiber protein Mtd. With the process of mutagenic reverse transcription and cDNA integration, DGR may introduce multiple nucleotide substitutions to Mtd gene and generates different receptor-binding molecules, thus making BPP-1 the ability to invade Bordetellae with diverse cell surfaces.

[0257] The systems may be used to generate an ssDNA donor using a retron- or DGR RT, which is then integrated by homologous recombination upon target cleavage or nicking using a TnpB polypeptide. In some embodiments, the systems may comprise DGRs and/or Group-II intron reverse transcriptases. The homing mechanism of DGRs or Group-II introns may be used in modifying a target polynucleotide. The DGRs or Group-II introns reverse transcriptase may be guided to a target polynucleotide by tethering to a nuclease-dead TnpB polypeptide, TALE, or ZF protein. In another embodiment, a non-retron/DGR reverse transcriptase (e.g., a viral RT) may be used for generating cDNA off of a self-priming RNA. In some embodiments, a ssDNA may be generated by an RT, but integrate it using a dead TnpB enzyme, creating an accessible R-loop instead of nicking/cleaving.

### TnpB Topoisomerase Systems

[0258] The one or more functional domains may be one or more topoisomerase domains. In some embodiments, an engineered system for modifying a target polynucleotide comprising: a TnpB protein; a topoisomerase domain; and a nucleic acid template comprising or encoding a donor polynucleotide to be inserted to a target sequence of the target polynucleotide. In some examples, two or more of: the TnpB protein; topoisomerase domain; and nucleic acid template may form a complex. In some examples, two or more of: the TnpB protein; topoisomerase domain, may be comprised in a fusion protein.

[0259] Topoisomerases are a class of enzymes that modify the topological state of DNA via the breakage and rejoining of nucleic acid strands. In some cases, a topoisomerase may be a DNA topoisomerase, which is an enzyme that controls and alters the topologic states of DNA during transcription and catalyzes the transient breaking and rejoining of a single strand of DNA which allows the strands to pass through one another, thus altering the topology of DNA.

[0260] In some embodiments, the topoisomerase domain is capable of ligating the donor polynucleotide with the target polynucleotide. The ligation may be achieved by sticky end or blunt end ligation. In an example, the donor polynucleotide may comprise an overhang comprising a sequence complementary to a region of the target polynucleotide. Examples of ligating the donor polynucleotide with the target polynucleotide include those of TOPO cloning, e.g., those described in “The Technology Behind TOPO Cloning,” at www.thermofisher.com/us/en/home/life-science/cloning/topo/topo-resources/the-technology-behind-topo-cloning.html.

[0261] In some embodiments, the topoisomerase domain may be associated with the donor polynucleotide. For example, the topoisomerase domain is covalently linked to the donor polynucleotide.

[0262] In some embodiments, a topoisomerase domain may be provided together with, e.g., associated (e.g., fused) with a TnpB protein (e.g., a TnpB protein or a variant thereof such as a dead TnpB or a TnpB nickase). Alternatively or additionally, the topoisomerase domain may be on a molecule different from the TnpB protein. In some cases, the topoisomerase domain may be associated with a donor polynucleotide. For example, the topoisomerase domain may be pre-loaded covalently with a donor DNA molecule. Such design may allow for efficient ligation of only a specific cargo. The topoisomerase domain may ligate the donor polynucleotide (e.g., a DNA molecule) to a target site on a target polynucleotide (e.g., a free double-stranded DNA end). In some embodiments, the donor polynucleotide may have an overhang that comprises a sequence complementary to a region of the target polynucleotide. For example, the overhang may invade into the target polynucleotide at a cut site generated by the TnpB protein.

[0263] Examples of topoisomerases include type I, including type IA and type IB topoisomerases, which cleave a single strand of a double-stranded nucleic acid molecule, and type II topoisomerases (e.g., gyrases), which cleave both strands of a double-stranded nucleic acid molecule.

[0264] Type IA and IB topoisomerases cleave one strand of a double-stranded nucleic acid molecule. In some examples, the cleavage of a double-stranded nucleic acid molecule by type IA topoisomerases generates a 5′ phosphate and a 3′ hydroxyl at the cleavage site, with the type IA topoisomerase covalently binding to the 5′ terminus of a cleaved strand. Cleavage of a double-stranded nucleic acid molecule by type IB topoisomerases may generate a 3′ phosphate and a 5′ hydroxyl at the cleavage site, with the type IB topoisomerase covalently binding to the 3′ terminus of a cleaved strand.

[0265] Examples of Type IA topoisomerases include E. coli topoisomerase I, E. coli topoisomerase III, eukaryotic topoisomerase II, archeal reverse gyrase, yeast topoisomerase III, Drosophila topoisomerase III, human topoisomerase III, Streptococcus pneumoniae topoisomerase III, and the like, including other type IA topoisomerases. A DNA-protein adduct is formed with the enzyme covalently binding to the 5′-thymidine residue, with cleavage occurring between the two thymidine residues.

[0266] Examples of Type IB topoisomerases include the nuclear type I topoisomerases present in all eukaryotic cells and those encoded by Vaccinia and other cellular poxviruses. The eukaryotic type IB topoisomerases are exemplified by those expressed in yeast, Drosophila and mammalian cells, including human cells. Viral type IB topoisomerases are exemplified by those produced by the vertebrate poxviruses (Vaccinia, Shope fibroma virus, ORF virus, fowlpox virus, and molluscum contagiosum virus), and the insect poxvirus (Amsacta moorei entomopoxvirus).

[0267] Examples of Type II topoisomerases include, bacterial gyrase, bacterial DNA topoisomerase IV, eukaryotic DNA topoisomerase II, and T-even phage encoded DNA topoisomerases. Type II topoisomerases may have both cleaving and ligating activities. Substrate double-stranded nucleic acid molecules of type II topoisomerase can be prepared such that the type II topoisomerase can form a covalent linkage to one strand at a cleavage site. For example, calf thymus type II topoisomerase can cleave a substrate ds nucleic acid molecule containing a 5′ recessed topoisomerase recognition site positioned three nucleotides from the 5′ end, resulting in dissociation of the three nucleic acid molecule 5′ to the cleavage site and covalent binding of the topoisomerase to the 5′ terminus of the ds nucleic acid molecule. Furthermore, upon contacting such a type II topoisomerase-charged ds nucleic acid molecule with a second nucleic acid molecule containing a 3′ hydroxyl group, the type II topoisomerase can ligate the sequences together, and then is released from the recombinant nucleic acid molecule.

[0268] In some examples, the topoisomerase is DNA topoisomerase I, e.g., a Vaccinia virus topoisomerase I. The topoisomerase may be pre-loaded with a donor polynucleotide. The Vaccinia virus topoisomerase may need a target comprising a 5′—OH group.

### TnpB Phosphatase Systems

[0269] The systems herein may further comprise a phosphatase domain. A phosphatase is an enzyme capable of removing a phosphate group from a molecule e.g., a nucleic acid such as DNA. Examples of phosphatases include calf intestinal phosphatase, shrimp alkaline phosphatase, Antarctic phosphatase, and APEX alkaline phosphatase.

[0270] In some examples, the 5′—OH group of in the target polynucleotide may be generated by a phosphatase. A topoisomerase compatible with a 5′ phosphate target may be used to generate stable loaded intermediates. In some cases, a TnpB polypeptide that leaves a 5′ OH after cleaving the target polynucleotide may be used. In some cases, the phosphatase domain may be associated with (e.g., fused to) the TnpB protein. The phosphatase domain may be capable of generating a-OH group at a 5′ end of the target polynucleotide. The phosphatase may be delivered separated from other components in the system, e.g., as a separate protein, on a separate vector from other components.

### TnpB Polyermase Systems

[0271] The systems herein may further comprise a polymerase domain. A polymerase refers to an enzyme that synthesizes chains of nucleic acids. The polymerase may be a DNA polymerase or an RNA polymerase.

[0272] In some embodiments, the systems comprise an engineered system for modifying a target polynucleotide comprising: a TnpB protein; a DNA polymerase domain; and a DNA template comprising a donor polynucleotide to be inserted to a target sequence of the target polynucleotide. In some examples, two or more of: the TnpB protein; DNA polymerase domain; and DNA template may form a complex. In some examples, two or more of: the TnpB protein; DNA polymerase domain; are comprised in a fusion protein. For example, the TnpB protein and DNA polymerase domain may be comprised in a fusion protein.

[0273] In some embodiments, the systems may comprise a TnpB enzyme (or variant thereof such as a dTnpB or TnpB nickase) and a DNA polymerase (e.g., phi29, T4, T7 DNA polymerase). The systems may further comprise a single-stranded DNA or double-stranded DNA template. The DNA template may comprise i) a first sequence homologous to a target site of the TnpB protein on the target polynucleotide, and/or ii) a second sequence homologous to another region of the target polynucleotide. In some embodiments, the template may be a synthetic single-stranded or PCR-generated DNA molecule, (optionally end-protected by modified nucleotides), or a viral genome (e.g., AAV). In another embodiment, the template is generated using a reverse transcriptase. When the system is delivered into a cell, an endogenous DNA polymerase in the cell may be used. Alternatively or additionally, an exogenous DNA polymerase may be expressed in the cell.

[0274] The DNA template may be end-protected by one or more modified nucleotides, or comprises a portion of a viral genome. In some embodiment, the DNA template comprises LNA or other modifications (e.g., at the 3′ end). The presence of LNA and/or the modifications may lead to more efficient annealing with the 3′ flap generated by TnpB protein cleavage.

[0275] Examples of DNA polymerase include Taq, Tne (exo-), Tma (exo-), Pfu (exo-), Pwo (exo-), Thermoanaerobacter thermohydrosulfuricus DNA polymerase, Thermococcus litoralis DNA polymerase I, E. coli DNA polymerase I, Taq DNA polymerase I, Tth DNA polymerase I, Bacillus stearothermophilus (Bst) DNA polymerase I, E. coli DNA polymerase III, bacteriophage T5 DNA polymerase, bacteriophage M2 DNA polymerase, bacteriophage T4 DNA polymerase, bacteriophage T7 DNA polymerase, bacteriophage phi29 DNA polymerase, bacteriophage PRD1 DNA polymerase, bacteriophage phi15 DNA polymerase, bacteriophage phi21DNA polymerase, bacteriophage PZE DNA polymerase, bacteriophage PZA DNA polymerase, bacteriophage Nf DNA polymerase, bacteriophage M2Y DNA polymerase, bacteriophage B103 DNA polymerase, bacteriophage SF5 DNA polymerase, bacteriophage GA-1 DNA polymerase, bacteriophage Cp-5 DNA polymerase, bacteriophage Cp-7 DNA polymerase, bacteriophage PR4 DNA polymerase, bacteriophage PR5 DNA polymerase, bacteriophage PR 722 DNA polymerase and bacteriophage L17 DNA polymerase.

### TnpB Ligase Systems

[0276] In general, the systems comprise a TnpB protein and a ligase associated with the TnpB protein. The TnpB protein may be recruited to the target sequence by an ωRNA comprising a spacer capable of binding the target sequence and generate a break on the target sequence. The ωRNA may further comprise a template sequence with desired mutations or other sequence elements. The template sequence may be ligated to the target sequence to introduce the mutations or other sequence elements to the nucleic acid molecule. The TnpB protein may be a nickase that generates a single-strand break on nucleic acid molecule, and the ligase may be a single-strand DNA ligase. In some embodiments, the systems comprise a pair of TnpB-ligases complexes with two distinct ωRNA sequences. Each TnpB-ligase complex can target one strand of a double-stranded polynucleotide and work together to effectively modify the sequence of the double-stranded polynucleotides.

[0277] In some examples, the TnpB is associated with a ligase or functional fragment thereof. The ligase may ligate a single-strand break (a nick) generated by the TnpB. In certain cases, the ligase may ligate a double-strand break generated by the TnpB. In certain examples, the TnpB is associated with a reverse transcriptase or functional fragment thereof.

[0278] The present invention further provides systems and methods of modifying a nucleic acid sequence using a pair of distinct TnpB-ligase-ωRNA complexes, said systems and methods comprising: (a) an engineered TnpB protein connected to or complexed with a ligase; (b) two distinct ωRNA sequences complexed with such TnpB-ligase protein complex to form a first and a second distinct TnpB-ligase ωRNA complexes; (c) the first TnpB-ligase-ωRNA complex binding to one strand of a target double-stranded polynucleotide sequence, and the second TnpB-ligase-ωRNA complex binding to another strand of the target double-stranded polynucleotide sequence; (d) upon binding of the said complexes to the locus of interest the effector protein induces the modification of the sequences associated with or at the target locus of interest, whereby the two TnpB-ligase-ωRNA complexes work together on different strands of the double-stranded target sequence and modify the sequence.

[0279] One of the advantages of using such a “pair” of TnpB-ligase-ωRNAcomplexes includes high efficiency in modifying the sequence associated with or at the locus of interest of target double-stranded polynucleotides.

[0280] In some embodiments, the TnpB protein can be a nickase. In a preferred embodiment, a ligase is linked to the TnpB protein. The ligase can ligate the donor sequence to the target sequence. The ligase can be a single-strand DNA ligase or a double-strand DNA ligase. The ligase can be fused to the carboxyl-terminus of a TnpB protein, or to the amino-terminus of a TnpB protein.

[0281] As used herein the term “ligase” refers to an enzyme, which catalyzes the joining of breaks (e.g., double-stranded breaks or single-stranded breaks (“nicks”) between adjacent bases of nucleic acids. For example, a ligase may be an enzyme capable of forming intra- or inter-molecular covalent bonds between a 5′ phosphate group and a 3′ hydroxyl group. The term “ligate” refers to the reaction of covalently joining adjacent oligonucleotides through formation of an internucleotide linkage.

[0282] DNA ligases fall into two general categories: ATP-dependent DNA ligases (EC 6.5.1.1), and NAD (+) dependent DNA ligases (EC 6.5.1.2). NAD (+) dependent DNA ligases are found only in bacteria (and some viruses) while ATP-dependent DNA ligases are ubiquitous. The ATP-dependent DNA ligases can be divided into four classes: DNA ligase I, II, III, and IV. DNA ligase I links Okazaki fragments to form a continuous strand of DNA; DNA ligase II is an alternatively spliced form of DNA ligase III, found only in non-dividing cells; DNA ligase III is involved in base excision repair; and DNA ligase IV is involved in the repair of DNA double-strand breaks by non-homologous end joining (NHEJ). Amongst all ligases, there are two types of prokaryotic and one type of eukaryotic ligases that are particularly well suited for facilitating the blunt-ended, double-stranded DNA ligation: Prokaryotic DNA ligases (T3 and T4) and Eukaryotic DNA ligase (Ligase 1).

[0283] In some cases, the ligase is specific for double-stranded nucleic acids (e.g., dsDNA, dsRNA, RNA/DNA duplex). An example of a ligase specific for double-stranded DNA and DNA/RNA hybrids is T4 DNA ligase. In some cases, the ligase is specific for single-stranded nucleic acids (e.g., ssDNA, ssRNA). An example of such ligase is CircLigase II. In some cases, the ligase is specific for RNA/DNA duplexes. In some cases, the ligase is able to work on single-stranded, double-stranded, and/or RNA/DNA nucleic acids in any combination.

[0284] In some cases, the ligase may be a pan-ligase, which is a single ligase with the ability to ligate both DNA and RNA targets. The ligase may be specific for a target (e.g., DNA-specific or RNA-specific). In some cases, the ligase may be a dual ligase system that include DNA-specific, RNA-specific, and/or pan-ligases, in any combination.

[0285] Examples of ligases that can be used with the disclosure include T4 DNA Ligase, T3 DNA Ligase, T7 DNA Ligase, E. coli DNA Ligase, HiFi Taq DNA Ligase, 9° NTM DNA Ligase, Taq DNA Ligase, SplintR® Ligase (also known as. PBCV-1 DNA Ligase or Chlorella virus DNA Ligase), Thermostable 5′ AppDNA/RNA Ligase, T4 RNA Ligase, T4 RNA Ligase 2, T4 RNA Ligase 2 Truncated, T4 RNA Ligase 2 Truncated K227Q, T4 RNA Ligase 2, Truncated KQ, RtcB Ligase (joins single stranded RNA with a 3″-phosphate or 2′,3′-cyclic phosphate to another RNA), CircLigase II, CircLigase ssDNA Ligase, CircLigase RNA Ligase, or Ampligase® Thermostable DNA Ligas, NAD-dependent ligases including Taq DNA ligase, Thermus filiformis DNA ligase, Escherichia coliDNA ligase, Tth DNA ligase, Thermus scotoductus DNA ligase (I and II), thermostable ligase, Ampligase thermostable DNA ligase, VanC-type ligase, 9° N DNA Ligase, Tsp DNA ligase, and novel ligases discovered by bioprospecting; ATP-dependent ligases including T4 RNA ligase, T4 DNA ligase, T3 DNA ligase, T7 DNA ligase, Pfu DNA ligase, DNA ligase I, DNA ligase III, DNA ligase IV, and novel ligases discovered by bioprospecting, and wild-type, mutant isoforms, and genetically engineered variants thereof. In a particular example, the ligase is a

[0286] In some embodiments, the examples of the ligases include those used in sequencing by synthesis or sequencing by ligation reactions.

### TnpB Helitron Systems

[0287] The systems and compositions herein may comprise a TnpB polypeptide, one or more nucleic acid components, and one or more components of a helitron. The systems and compositions may be used to insert a donor polynucleotide to a target polynucleotide. The systems and compositions may further comprise a donor polynucleotide.

[0288] The term “helitron”, as used herein, refers to a polynucleotide (or nucleic acid segment), recognized as a transposon that captures and mobilizes gene fragments in eukaryotes. The term “helitron” as used herein refers to transposase that comprises an endonuclease domain and a C-terminal helicase domain. Helitrons are rolling-circle RNA transposons. In particular embodiments, the helitron encodes a 1400 to about 2000 amino acid, or about 1800 amino acid multidomain transposase. In embodiments, the helitron comprises a hairpin near the 3′end to function as a transposition terminator. In embodiments, the transposon comprises a RepHel motif comprising a replication initiator (Rep) and a DNA helicase (hel) domain. See, Thomas J. & Pritham E. J. Helitrons, the eukaryotic rolling-circle transposable elements. Microbiol. Spectr. 3, 893-926 (2015). In embodiments, the helitron comprises a Rep nuclease domain and C-terminal helicase domain and inserts between an AT dinucleotide in single strand DNA. In an aspect, the C-terminal helicase unwinds the DNA in a 5′ to 3′ direction. The HUH nuclease domain may comprise one or two active site tyrosine residues, in embodiments, is a 2 Tyrosine (Y2) HUH endonuclease domain. Helitrons can encompass helentron, proto-helentron and helitron2 type proteins, structures of which can be as described in Thomas et al., 2015 at FIGS. 1 and 3, incorporated specifically by reference. Particular organsisms in which the helitron or helentrons have been found can include those in Table 1 of Thomas J. & Pritham E. J. Helitrons, the eukaryotic rolling-circle transposable elements. Microbiol. Spectr. 3, 893-926 (2015), incorporated herein by reference. Similarly, helitrons can be identified based at least in part on the Rep motif, and conserived residues in the helitrons, and according to the alignment sequence of FIG. 2 of Thomas J. & Pritham E. J. Helitrons, the eukaryotic rolling-circle transposable elements. Microbiol. Spectr. 3, 893-926 (2015), specifically incorporated herein by reference.

[0289] The expression “helitron reaction” used herein refers to a reaction wherein a transposase inserts a donor polynucleotide sequence in or adjacent to an insertion site on a target polynucleotide. The insertion site may contain a sequence or secondary structure recognized by the helitron and/or an insertion motif sequence in the target polynucleotide into which the donor polynucleotide sequence may be inserted.

[0290] As described in Grabundzija 2018, the helitron terminal sequences contains a distinct ˜150 base pairs (bp) long sequence with an absolutely conserved dinucleotide at the end of left terminal sequence (LTS), and a tetranucleotide at the end of right terminal sequence (RTS) which is preceded by a palindromic sequence that can form a hairpin structure. Grabundzija et al., Nat. Commun. 2018; 9:1278; doi:10.1035/s41467-018-03688-w.

[0291] The helitron end sequences may be responsible for identifying the donor polynucleotide for transposition. The helitron end sequences may be the DNA sequences used to perform a transposition reaction, the end sequences may be referred to herein as right terminal sequences and left terminal sequence. The donor polynucleotide can be configured to comprise a first and second helitron recognition sequence that are at least 80%, 85%, 90%, 95% 96%, 97%, 98%, 99% or 100% complementary to a left terminal sequence and/or a right terminal sequence of a polynucleotide encoding the helitron polypeptide.

[0292] In an aspect, the palindromic sequence may be located upstream of the right terminal sequence, for example, about 5, 10, 15, 20, 25, 30, 35 nucleotides upstream of the right terminal sequence end, or about 10 to 15 nucleotides upstream of the right terminal sequence end, about 10 to 12 nucleotides or about 11 nucleotides upstream of the right terminal sequence end. Ivana Grabundzija, Nat Commun. 2016; 7:10716, doi:10.1038/ncomms10716, incorporated herein by reference.

[0293] Exemplary helitrons can be identified using software, for example (EAHelitron) that has been used to identify Helitrons in a wide range of plant genomes. See, Hu, K., Xu, K., Wen, J et al. Helitron distribution in Brassicaceae and whole Genome Helitron density as a character for distinguishing plant species. BMC Bioinformatics 20, 354 (2019). doi:10.1186/s12859-019-2945-8, incorporated herein by reference.

[0294] The helitron may be derived from a eukaryote. In an aspect, the helitron is derived from a mammalian genome, in an aspect, vespertilionid bats, e.g., Helibat. In embodiments, the helitron is derived from derived from a Helibat transposon. In embodiments, the helitron is Helraiser, the full DNA sequence of the consensus transposon, including left terminal and right terminal sequences as well as hairpin identified is provided in Grabundzija, 2016 at Supplementary FIG. 1, specifically incorporated herein by reference. In an aspect, the helitron is flanked by left and right terminal sequences of the transposon. In an aspect, the left terminal sequence and right terminal sequence terminates with the conserved 5′-TC/CTAG-3′ motif. In one embodiment, the helitron may comprise a palindromic sequence that is about 10 to about 35, or about 5-25 bp or about 19-bp-long palindromic sequence with the potential to form a hairpin structure.

[0295] Elements of these systems may be engineered to work within the context of the invention. For example, a helitron polypeptide may be fused to a polypeptide capable of generating an R-loop. Fusion may be by any appropriate linker, in an exemplary embodiment, XTEN16. The binding elements that allow a helitron polypeptide to bind, for example, the use of sequences complementary to the right terminal sequence and the left terminal sequence of the helitron may be engineered into a donor construct to facilitate entry of a donor polynucleotide sequence into a target polynucleotide.

[0296] In certain example embodiments, the Isc polypeptide, via formation of complex with a nucleic acid component sequence, directs the helitron polypeptide to a target sequence in a target polynucleotide, where the helitron facilitates integration of a donor polynucleotide sequence into the target polynucleotide.

[0297] The helitron polypeptides may also comprise one or more truncations or excisions to remove domains or regions of wild-type protein to arrive at a minimal polypeptide, alter functionality according to the system in which the helitron is used, or mutated to enhance or diminish particular activities associated with the helitron, i.e., nuclease activity or helicase activity.

### Multiplexing

[0298] In one embodiment, TnpB polypeptides may be used in a multiplex (tandem) targeting approach. For example, TnpB polypeptide herein can employ more than one nucleic acid component molecule without losing activity. This may enable the use of the TnpB polypeptide, systems or complexes as defined herein for targeting multiple DNA targets, genes or gene loci, with a single enzyme, system or complex as defined herein. The nucleic acid component molecules may be tandemly arranged, optionally separated by a nucleotide sequence such as a conserved nucleotide sequence as defined herein. The position of the different nucleic acid component molecules is the tandem does not influence the activity.

[0299] In one aspect, the TnpB polypeptides may be used for tandem or multiplex targeting. It is to be understood that any of the TnpB polypeptides, complexes, or compositions herein elsewhere may be used in such an approach. Any of the methods, products, compositions and uses as described herein elsewhere are equally applicable with the multiplex or tandem targeting approach further detailed below. By means of further guidance, the following particular aspects and embodiments are provided.

[0300] In one aspect, the invention provides for the use of a TnpB polypeptide, complex or system as defined herein for targeting multiple gene loci. In one embodiment, this can be established by using multiple (tandem or multiplex) nucleic acid component molecule sequences.

[0301] In one aspect, the invention provides methods for using one or more elements of a TnpB polypeptide, complex or system as defined herein for tandem or multiplex targeting, wherein said system herein comprises multiple nucleic acid component molecule sequences. Said sequences are separated by a nucleotide sequence, such as a conserved nucleotide sequence as defined herein elsewhere.

[0302] The TnpB polypeptides, compositions, systems, or complexes as defined herein provides an effective means for modifying multiple target polynucleotides. The TnpB polypeptide, system or complex as defined herein has a wide variety of utility including modifying (e.g., deleting, inserting, translocating, inactivating, activating) one or more target polynucleotides in a multiplicity of cell types. As such the TnpB polypeptide, system or complex as defined herein of the invention has a broad spectrum of applications in, e.g., gene therapy, drug screening, disease diagnosis, and prognosis, including targeting multiple gene loci within a single system.

[0303] In one aspect, the present disclosure provides a TnpB polypeptide, system or complex as defined herein, having a TnpB polypeptide having at least one destabilization domain associated therewith, and multiple nucleic acid component molecule that target multiple nucleic acid molecules such as DNA molecules, whereby each of said multiple nucleic acid component molecules specifically targets its corresponding nucleic acid molecule, e.g., DNA molecule. Each nucleic acid molecule target, e.g., DNA molecule can encode a gene product or encompass a gene locus. Using multiple nucleic acid component molecules hence enables the targeting of multiple gene loci or multiple genes. In one embodiment the TnpB polypeptide may cleave the DNA molecule encoding the gene product. In one embodiment expression of the gene product is altered. The TnpB polypeptide and the nucleic acid component molecules do not naturally occur together. The present disclosure comprehends the nucleic acid component molecules comprising tandemly arranged nucleic acid component molecule. The present disclosure further comprehends coding sequences for the TnpB polypeptide being codon optimized for expression in a eukaryotic cell. In an embodiment the eukaryotic cell is a mammalian cell, a plant cell or a yeast cell and in a more preferred embodiment the mammalian cell is a human cell. Expression of the gene product may be decreased. The TnpB polypeptide may form part of a system or complex, which further comprises tandemly arranged nucleic acid component molecule comprising a series of 2, 3, 4, 5, 6, 7, 8, 9, 10, 15, 25, 25, 30, or more than 30 nucleic acid component molecules, each capable of specifically hybridizing to a target sequence in a genomic locus of interest in a cell. In one embodiment, the functional system or complex binds to the multiple target sequences. In one embodiment, the functional system or complex may edit the multiple target sequences, e.g., the target sequences may comprise a genomic locus, and in one embodiment, there may be an alteration of gene expression. In one embodiment, the functional system or complex may comprise further functional domains. In one embodiment, the invention provides a method for altering or modifying expression of multiple gene products. The method may comprise introducing into a cell containing said target nucleic acids, e.g., DNA molecules, or containing and expressing target nucleic acid, e.g., DNA molecules; for instance, the target nucleic acids may encode gene products or provide for expression of gene products (e.g., regulatory sequences).

[0304] In one embodiment, the TnpB polypeptide used for multiplex targeting is associated with one or more functional domains. In some more specific embodiments, the TnpB polypeptide used for multiplex targeting is a dead TnpB polypeptide. The inventors have found that the TnpB polypeptide as described herein may enable improved and/or direct access to one or more nucleotides involved in the DNA: RNA duplex.

### Inducible Systems

[0305] In one embodiment, a TnpB polypeptide may form a component of an inducible system. The inducible nature of the system would allow for spatiotemporal control of gene editing or gene expression using a form of energy. The form of energy may include but is not limited to electromagnetic radiation, sound energy, chemical energy, and thermal energy. Examples of inducible system include tetracycline inducible promoters (Tet-On or Tet-Off), small molecule two-hybrid transcription activations systems (FKBP, ABA, etc.), or light inducible systems (Phytochrome, LOV domains, or cryptochrome). In one embodiment, the TnpB polypeptide may be a part of a Light Inducible Transcriptional Effector (LITE) to direct changes in transcriptional activity in a sequence-specific manner. The components of a light may include a TnpB polypeptide, a light-responsive cytochrome heterodimer (e.g., from Arabidopsis thaliana), and a transcriptional activation/repression domain. Further examples of inducible DNA binding proteins and methods for their use are provided in U.S. Provisional Application Nos. 61/736,465 and U.S. 61/721,283, and International Patent Publication No. WO 2014/018423 A2 which is hereby incorporated by reference in its entirety.

### Self-Inactivating Systems

[0306] Once all copies of a gene in the genome of a cell have been edited, continued expression of the system in that cell is no longer necessary. Indeed, sustained expression would be undesirable in case of off-target effects at unintended genomic sites, etc. Thus time-limited expression would be useful. Inducible expression offers one approach, but in addition Applicants have engineered a self-Inactivating system that relies on the use of a non-coding nucleic acid component molecule target sequence within the vector itself. Thus, after expression begins, the system will lead to its own destruction, but before destruction is complete it will have time to edit the genomic copies of the target gene (which, with a normal point mutation in a diploid cell, requires at most two edits). Simply, the self-inactivating system includes additional RNA (e.g., nucleic acid component molecule) that targets the coding sequence for the TnpB polypeptide itself or that targets one or more non-coding nucleic acid component molecule target sequences complementary to unique sequences present in one or more of the following: (a) within the promoter driving expression of the non-coding RNA elements, (b) within the promoter driving expression of the TnpB polypeptide gene, (c) within 100 bp of the ATG translational start codon in the TnpB polypeptide coding sequence, (d) within the inverted terminal repeat (iTR) of a viral delivery vector, e.g., in the AAV genome.

[0307] In some aspects, a single nucleic acid component molecule is provided that is capable of hybridization to a sequence downstream of a TnpB polypeptide start codon, whereby after a period of time there is a loss of the TnpB polypeptide expression. In some aspects, one or more nucleic acid component molecule(s) are provided that are capable of hybridization to one or more coding or non-coding regions of the polynucleotide encoding the system, whereby after a period of time there is a inactivation of one or more, or in some cases all, of the system. In some aspects of the system, and not to be limited by theory, the cell may comprise a plurality of complexes, wherein a first subset of complexes comprise a first nucleic acid component molecule capable of targeting a genomic locus or loci to be edited, and a second subset of complexes comprise at least one second nucleic acid component molecule capable of targeting the polynucleotide encoding the system, wherein the first subset of complexes mediate editing of the targeted genomic locus or loci and the second subset of complexes eventually inactivate the system, thereby inactivating further expression in the cell.

[0308] The various coding sequences (TnpB polypeptide and nucleic acid component molecule) can be included on a single vector or on multiple vectors. For instance, it is possible to encode the enzyme on one vector and the various RNA sequences on another vector, or to encode the enzyme and one nucleic acid component molecule on one vector, and the remaining nucleic acid component molecule on another vector, or any other permutation. In general, a system using a total of one or two different vectors is preferred.

[0309] Where multiple vectors are used, it is possible to deliver them in unequal numbers, and ideally with an excess of a vector which encodes the first nucleic acid component molecule relative to the second nucleic acid component molecule, thereby assisting in delaying final inactivation of the system until genome editing has had a chance to occur.

[0310] The first nucleic acid component molecule can target any target sequence of interest within a genome, as described elsewhere herein. The second nucleic acid component molecule targets a sequence within the vector which encodes the TnpB polypeptide, and thereby inactivates the enzyme's expression from that vector. Thus, the target sequence in the vector must be capable of inactivating expression. Suitable target sequences can be, for instance, near to or within the translational start codon for the TnpB polypeptide coding sequence, in a non-coding sequence in the promoter driving expression of the non-coding RNA elements, within the promoter driving expression of the TnpB polypeptide gene, within 100 bp of the ATG translational start codon in the TnpB polypeptide coding sequence, and/or within the inverted terminal repeat (iTR) of a viral delivery vector, e.g., in the AAV genome. A double stranded break near this region can induce a frame shift in the TnpB polypeptide coding sequence, causing a loss of protein expression. An alternative target sequence for the “self-inactivating” nucleic acid component molecule would aim to edit/inactivate regulatory regions/sequences needed for the expression of the system or for the stability of the vector. For instance, if the promoter for the TnpB polypeptide coding sequence is disrupted then transcription can be inhibited or prevented. Similarly, if a vector includes sequences for replication, maintenance. or stability then it is possible to target these. For instance, in a AAV vector a useful target sequence is within the iTR. Other useful sequences to target can be promoter sequences, polyadenylation sites, etc.

[0311] Furthermore, if the nucleic acid component molecules are expressed in array format, the “self-inactivating” nucleic acid component molecules that target both promoters simultaneously will result in the excision of the intervening nucleotides from within the TnpB polypeptide expression construct, effectively leading to its complete inactivation. Similarly, excision of the intervening nucleotides will result where the nucleic acid component molecules target both ITRs, or targets two or more other components simultaneously. Self-inactivation as explained herein is applicable, in general, with systems in order to provide regulation of the systems. For example, self-inactivation as explained herein may be applied to the repair of mutations, for example expansion disorders, as explained herein. As a result of this self-inactivation, repair may be only transiently active.

[0312] Addition of non-targeting nucleotides to the 5′ end (e.g., 1-10 nucleotides, preferably 1-5 nucleotides) of the “self-inactivating” nucleic acid component molecule can be used to delay its processing and/or modify its efficiency as a means of ensuring editing at the targeted genomic locus prior to shut down.

[0313] In one aspect of the self-inactivating AAV system, plasmids that co-express one or more nucleic acid component molecule targeting genomic sequences of interest (e.g., 1-2, 1-5, 1-10, 1-15, 1-20, 1-30) may be established with “self-inactivating” nucleic acid component molecule that target an TnpB polypeptide sequence at or near the engineered ATG start site (e.g., within 5 nucleotides, within 15 nucleotides, within 30 nucleotides, within 50 nucleotides, within 100 nucleotides). A regulatory sequence in the U6 promoter region can also be targeted with a nucleic acid component molecule. The U6-driven nucleic acid component molecules may be designed in an array format such that multiple nucleic acid component molecule sequences can be simultaneously released. When first delivered into target tissue/cells (left cell) nucleic acid component molecules begin to accumulate while TnpB polypeptide levels rise in the nucleus. TnpB polypeptide complexes with all of the nucleic acid component molecules to mediate genome editing and self-inactivation of the TnpB polypeptide plasmids.

[0314] One aspect of a self-inactivating system is expression of singly or in tandem array format from 1 up to 4 or more different nucleic acid component sequences; e.g., up to about 20 or about 30 sequences. Each individual self-inactivating nucleic acid component molecule sequence may target a different target. Such may be processed from, e.g., one chimeric pol3 transcript. Pol3 promoters such as U6 or H1 promoters may be used. Pol2 promoters such as those mentioned throughout herein. Inverted terminal repeat (iTR) sequences may flank the Pol3 promoter-nucleic acid component molecule(s)-Pol2 promoter-TnpB polypeptide.

[0315] One aspect of a tandem array transcript is that one or more nucleic acid component molecule(s) edit the one or more target(s) while one or more self-inactivating nucleic acid component molecules inactivate the system. Thus, for example, the described system for repairing expansion disorders may be directly combined with the self-inactivating system described herein. Such a system may, for example, have two nucleic acid component molecules directed to the target region for repair as well as at least a third nucleic acid component molecule directed to self-inactivation of the TnpB polypeptide or systems.

[0316] The nucleic acid component molecule may be a control molecule. For example, it may be engineered to target a nucleic acid sequence encoding the TnpB polypeptide itself, as described in U.S. Patent Publication No. US2015232881A1, the disclosure of which is hereby incorporated by reference. In one embodiment, a system or composition may be provided with just the nucleic acid component molecule engineered to target the nucleic acid sequence encoding the TnpB polypeptide. In addition, the system or composition may be provided with the nucleic acid component molecule engineered to target the nucleic acid sequence encoding the TnpB polypeptide, as well as nucleic acid sequence encoding the TnpB polypeptide and, optionally a second nucleic acid component molecule and, further optionally, a repair template. The second nucleic acid component may be the primary target of the system or composition (such a therapeutic, diagnostic, knock out etc. as defined herein). In this way, the system or composition is self-inactivating. This is exemplified in relation to Cas in US2015232881A1 (also published as WO2015070083 (A1), and may be extrapolated to TnpB polypeptides disclosed herein, e.g., TnpB polypeptides.

### Polynucleotides Encoding Tnpb Systems and Vectors

[0317] The systems herein may comprise one or more polynucleotides. The polynucleotide(s) may comprise coding sequences of components of the systems herein, e.g., TnpB polypeptide, nucleic acid component(s), functional domain(s), donor polynucleotide(s), and/or other components in the systems. The present disclosure further provides vectors or vector systems comprising one or more polynucleotides herein. The vectors or vector systems include those described in the delivery sections herein.

[0318] The terms “polynucleotide”, “nucleotide”, “nucleotide sequence”, “nucleic acid” and “oligonucleotide” are used interchangeably. They refer to a polymeric form of nucleotides of any length, either deoxyribonucleotides or ribonucleotides, or analogs thereof. Polynucleotides may have any three-dimensional structure, and may perform any function, known or unknown. The following are non-limiting examples of polynucleotides: coding or non-coding regions of a gene or gene fragment, loci (locus) defined from linkage analysis, exons, introns, messenger RNA (mRNA), transfer RNA, ribosomal RNA, short interfering RNA (siRNA), short-hairpin RNA (snucleic acid component), micro-RNA (miRNA), ribozymes, cDNA, recombinant polynucleotides, branched polynucleotides, plasmids, vectors, isolated DNA of any sequence, isolated RNA of any sequence, nucleic acid probes, and primers. The term also encompasses nucleic-acid-like structures with synthetic backbones, see, e.g., Eckstein, 1991; Baserga et al., 1992; Milligan, 1993; WO 97/03211; WO 96/39154; Mata, 1997; Strauss-Soukup, 1997; and Samstag, 1996. A polynucleotide may comprise one or more modified nucleotides, such as methylated nucleotides and nucleotide analogs. If present, modifications to the nucleotide structure may be imparted before or after assembly of the polymer. The sequence of nucleotides may be interrupted by non-nucleotide components. A polynucleotide may be further modified after polymerization, such as by conjugation with a labeling component. As used herein the term “wild type” is a term of the art understood by skilled persons and means the typical form of an organism, strain, gene or characteristic as it occurs in nature as distinguished from mutant or variant forms. A “wild type” can be a base line. As used herein the term “variant” should be taken to mean the exhibition of qualities that have a pattern that deviates from what occurs in nature. The terms “non-naturally occurring” or “engineered” are used interchangeably and indicate the involvement of the hand of man. The terms, when referring to nucleic acid molecules or polypeptides mean that the nucleic acid molecule or the polypeptide is at least substantially free from at least one other component with which they are naturally associated in nature and as found in nature. “Complementarity” refers to the ability of a nucleic acid to form hydrogen bond(s) with another nucleic acid sequence by either traditional Watson-Crick base pairing or other non-traditional types. A percent complementarity indicates the percentage of residues in a nucleic acid molecule which can form hydrogen bonds (e.g., Watson-Crick base pairing) with a second nucleic acid sequence (e.g., 5, 6, 7, 8, 9, 10 out of 10 being 50%, 60%, 70%, 80%, 90%, and 100% complementary). “Perfectly complementary” means that all the contiguous residues of a nucleic acid sequence will hydrogen bond with the same number of contiguous residues in a second nucleic acid sequence. “Substantially complementary” as used herein refers to a degree of complementarity that is at least 60%, 65%, 70%, 75%, 80%, 85%, 90%, 95%, 97%, 98%, 99%, or 100% over a region of 8, 9, 10, 11, 12, 13, 14, 15, 16, 17, 18, 19, 20, 21, 22, 23, 24, 25, 30, 35, 40, 45, 50, or more nucleotides, or refers to two nucleic acids that hybridize under stringent conditions. As used herein, “stringent conditions” for hybridization refer to conditions under which a nucleic acid having complementarity to a target sequence predominantly hybridizes with the target sequence, and substantially does not hybridize to non-target sequences. Stringent conditions are generally sequence-dependent and vary depending on a number of factors. In general, the longer the sequence, the higher the temperature at which the sequence specifically hybridizes to its target sequence. Non-limiting examples of stringent conditions are described in detail in Tijssen (1993), Laboratory Techniques In Biochemistry And Molecular Biology-Hybridization With Nucleic Acid Probes Part I, Second Chapter “Overview of principles of hybridization and the strategy of nucleic acid probe assay”, Elsevier, N.Y. Where reference is made to a polynucleotide sequence, then complementary or partially complementary sequences are also envisaged. These are preferably capable of hybridizing to the reference sequence under highly stringent conditions. “Hybridization” refers to a reaction in which one or more polynucleotides react to form a complex that is stabilized via hydrogen bonding between the bases of the nucleotide residues. The hydrogen bonding may occur by Watson Crick base pairing, Hoogstein binding, or in any other sequence specific manner. The complex may comprise two strands forming a duplex structure, three or more strands forming a multi stranded complex, a single self-hybridizing strand, or any combination of these. A hybridization reaction may constitute a step in a more extensive process, such as the initiation of PCR, or the cleavage of a polynucleotide by an enzyme. A sequence capable of hybridizing with a given sequence is referred to as the “complement” of the given sequence. As used herein, the term “genomic locus” or “locus” (plural loci) is the specific location of a gene or DNA sequence on a chromosome. A “gene” refers to stretches of DNA or RNA that encode a polypeptide or an RNA chain that has functional role to play in an organism and hence is the molecular unit of heredity in living organisms. For the purpose of this invention, it may be considered that genes include regions which regulate the production of the gene product, whether or not such regulatory sequences are adjacent to coding and/or transcribed sequences. Accordingly, a gene includes, but is not necessarily limited to, promoter sequences, terminators, translational regulatory sequences such as ribosome binding sites and internal ribosome entry sites, enhancers, silencers, insulators, boundary elements, replication origins, matrix attachment sites and locus control regions. As used herein, “expression of a genomic locus” or “gene expression” is the process by which information from a gene is used in the synthesis of a functional gene product. The products of gene expression are often proteins, but in non-protein coding genes such as rRNA genes or tRNA genes, the product is functional RNA. The process of gene expression is used by all known life-eukaryotes (including multicellular organisms), prokaryotes (bacteria and archaea) and viruses to generate functional products to survive. As used herein “expression” of a gene or nucleic acid encompasses not only cellular gene expression, but also the transcription and translation of nucleic acid(s) in cloning systems and in any other context. As used herein, “expression” also refers to the process by which a polynucleotide is transcribed from a DNA template (such as into and mRNA or other RNA transcript) and/or the process by which a transcribed mRNA is subsequently translated into peptides, polypeptides, or proteins. Transcripts and encoded polypeptides may be collectively referred to as “gene product.” If the polynucleotide is derived from genomic DNA, expression may include splicing of the mRNA in a eukaryotic cell. The terms “polypeptide”, “peptide” and “protein” are used interchangeably herein to refer to polymers of amino acids of any length. The polymer may be linear or branched, it may comprise modified amino acids, and it may be interrupted by non amino acids. The terms also encompass an amino acid polymer that has been modified; for example, disulfide bond formation, glycosylation, lipidation, acetylation, phosphorylation, or any other manipulation, such as conjugation with a labeling component. As used herein the term “amino acid” includes natural and/or unnatural or synthetic amino acids, including glycine and both the D or L optical isomers, and amino acid analogs and peptidomimetics. As used herein, the term “domain” or “protein domain” refers to a part of a protein sequence that may exist and function independently of the rest of the protein chain. As described in aspects of the invention, sequence identity is related to sequence homology. Homology comparisons may be conducted by eye, or more usually, with the aid of readily available sequence comparison programs. These commercially available computer programs may calculate percent (%) homology between two or more sequences and may also calculate the sequence identity shared by two or more amino acid or nucleic acid sequences.

[0319] In one embodiment, the polynucleotide sequence is recombinant DNA. In further embodiments, the polynucleotide sequence further comprises additional sequences as described elsewhere herein. In one embodiment, the nucleic acid sequence is synthesized in vitro.

[0320] The present disclosure provides polynucleotide molecules that encode one or more components of the system or TnpB polypeptide as referred to in any embodiment herein. In one embodiment, the polynucleotide molecules may comprise further regulatory sequences. By means of guidance and not limitation, the polynucleotide sequence can be part of an expression plasmid, a minicircle, a lentiviral vector, a retroviral vector, an adenoviral or adeno-associated viral vector, a piggyback vector, or a tol2 vector. In one embodiment, the polynucleotide sequence may be a bicistronic expression construct. In further embodiments, the isolated polynucleotide sequence may be incorporated in a cellular genome. In yet further embodiments, the isolated polynucleotide sequence may be part of a cellular genome. In further embodiments, the isolated polynucleotide sequence may be comprised in an artificial chromosome. In one embodiment, the 5′ and/or 3′ end of the isolated polynucleotide sequence may be modified to improve the stability of the sequence of actively avoid degradation. In one embodiment, the isolated polynucleotide sequence may be comprised in a bacteriophage. In other embodiments, the isolated polynucleotide sequence may be contained in agrobacterium species. In one embodiment, the isolated polynucleotide sequence is lyophilized.

### Codon Optimization

[0321] Aspects of the invention relate to polynucleotide molecules that encode one or more components of one or more systems as described in any of the embodiments herein, wherein at least one or more regions of the polynucleotide molecule may be codon optimized for expression in eukaryotic cells. In one embodiment, the polynucleotide molecules that encode one or more components of one or more systems as described in any of the embodiments herein are optimized for expression in a mammalian cell or a plant cell.

[0322] An example of a codon optimized sequence is in this instance a sequence optimized for expression in a eukaryote, e.g., humans (i.e., being optimized for expression in humans), or for another eukaryote, animal or mammal as herein discussed. In one embodiment, an enzyme coding sequence encoding a DNA/RNA-targeting TnpB polypeptide is codon optimized for expression in particular cells, such as eukaryotic cells. The eukaryotic cells may be those of or derived from a particular organism, such as a plant or a mammal, including but not limited to human, or non-human eukaryote or animal or mammal as herein discussed, e.g., mouse, rat, rabbit, dog, livestock, or non-human mammal or primate. In one embodiment, processes for modifying the germ line genetic identity of human beings and/or processes for modifying the genetic identity of animals which are likely to cause them suffering without any substantial medical benefit to man or animal, and also animals resulting from such processes, may be excluded. In general, codon optimization refers to a process of modifying a nucleic acid sequence for enhanced expression in the host cells of interest by replacing at least one codon (e.g., about or more than about 1, 2, 3, 4, 5, 10, 15, 20, 25, 50, or more codons) of the native sequence with codons that are more frequently or most frequently used in the genes of that host cell while maintaining the native amino acid sequence. Various species exhibit particular bias for certain codons of a particular amino acid. Codon bias (differences in codon usage between organisms) often correlates with the efficiency of translation of messenger RNA (mRNA), which is in turn believed to be dependent on, among other things, the properties of the codons being translated and the availability of particular transfer RNA (tRNA) molecules. The predominance of selected tRNAs in a cell is generally a reflection of the codons used most frequently in peptide synthesis. Accordingly, genes can be tailored for optimal gene expression in a given organism based on codon optimization. Codon usage tables are readily available, for example, at the “Codon Usage Database” available at www.kazusa.orjp/codon/and these tables can be adapted in a number of ways. See Nakamura, Y., et al. “Codon usage tabulated from the international DNA sequence databases: status for the year 2000” Nucl. Acids Res. 28:292 (2000). Computer algorithms for codon optimizing a particular sequence for expression in a particular host cell are also available, such as Gene Forge (Aptagen; Jacobus, PA), are also available. In one embodiment, one or more codons (e.g., 1, 2, 3, 4, 5, 10, 15, 20, 25, 50, or more, or all codons) in a sequence encoding a TnpB polypeptide corresponds to the most frequently used codon for a particular amino acid.

### Delivery

[0323] The present disclosure also provides delivery systems for introducing components of the systems and compositions herein to cells, tissues, organs, or organisms. A delivery system may comprise one or more delivery vehicles and/or cargos. Exemplary delivery systems and methods include those described in paragraphs [00117] to [00278] of Feng Zhang et al., (WO2016106236A1), and pages 1241-1251 and Table 1 of Lino C A et al., Delivering CRISPR: a review of the challenges and approaches, DRUG DELIVERY, 2018, VOL. 25, NO. 1, 1234-1257, which are incorporated by reference herein in their entireties and can be adapted for use with the TnpB proteins disclosed herein.

[0324] In one embodiment, the delivery systems may be used to introduce the components of the systems and compositions to plant cells. For example, the components may be delivered to plant using electroporation, microinjection, aerosol beam injection of plant cell protoplasts, biolistic methods, DNA particle bombardment, and/or Agrobacterium-mediated transformation. Examples of methods and delivery systems for plants include those described in Fu et al., Transgenic Res. 2000 February; 9(1):11-9; Klein R M, et al., Biotechnology. 1992; 24:384-6; Casas A M et al., Proc Natl Acad Sci USA. 1993 Dec. 1; 90(23): 11212-11216; and U.S. Pat. No. 5,563,055, Davey M R et al., Plant Mol Biol. 1989 September; 13(3):273-85, which are incorporated by reference herein in their entireties.

[0325] The example delivery compositions, systems, and methods described herein related to composition or TnpB polypeptide also apply to functional domains and other components (e.g., other proteins and polynucleotides related to the TnpB polypeptide, such as reverse transcriptase, nucleotide deaminase, retrotransposon, donor polynucleotide, etc.). In a preferred embodiment, the composition comprises delivery of the polypeptides via mRNA.

### RNA Delivery

[0326] In one embodiment, the TnpB system may comprise is delivered as an mRNA encoding the TnpB polypeptide. The ωRNA may be delivered with or separately from the mRNA encoding the TnpB polypeptide. The in vivo translation efficiency of mRNA molecules may be further increased by RNA engineering. To achieve effective translation, mRNA requires five structural elements, including the 5′ cap, 3′ poly(A) tail, protein-coding sequence and 5′ and 3′ untranslated regions (UTRs) with sequence engineering of one or more of these elements may be utilized to improve translation in vivo.

[0327] In some embodiments, the isolated mRNA is not self-replicating.

[0328] In some embodiment, the isolated mRNA comprises and/or encodes one or more 5′terminal cap (or cap structure), 3′terminal cap, 5′untranslated region, 3′untranslated region, a tailing region, or any combination thereof.

[0329] In some embodiments, the capping region of the isolated mRNA region may be from 1 to 10, e.g., 2-9, 3-8, 4-7, 1-5, 5-10, or at least 2, or 10 or fewer nucleotides in length. In some embodiments, the cap is absent.

[0330] In an exemplary embodiment, mRNA can be synthesized in vitro and transferred directly into target cells and may be further modified. For example, the mRNA may comprise a 5′ end of endogenous mRNAs modified with a 7-methylguanosine cap structure, with polyadenylated 3′ end, which may facilitate protein production. Modification of pyrimidine residues may also be performed to enhance transgene expression from delivered mRNAs, as it may lower stimulation of the innate immune system of host cells. In an example embodiment, the mRNA comprises an anti-reverse cap analog and a 120-nt poly(A) tail, and optionally may comprise cytosine and uridine residues replaced with 5-methylcytosine and pseudouridine. See, U.S. Patent Publication 2019/0151474, incorporated herein by reference.

[0331] In some embodiments, a 5′-cap structure is cap0, cap1, ARCA, inosine, N1-methyl-guanosine, 2′-fluoro-guanosine, 7-deaza-guanosine, 8-oxo-guanosine, 2-amino-guanosine, LNA-guanosine, or 2-azido-guanosine.

[0332] In some embodiments, the 5′terminal cap is 7mG(5′)ppp(5′)NImpNp, m7GpppG cap, N7-methylguanine. In some embodiments, the 3′terminal cap is a 3′-O-methyl-m7GpppG.

[0333] In some embodiments, the 3′-UTR is an alpha-globin 3′-UTR. In some embodiments, the 5′-UTR comprises a Kozak sequence.

[0334] In some embodiments, the tailing sequence may range from absent to 500 nucleotides in length (e.g., at least 60, 70, 80, 90, 120, 140, 160, 180, 200, 250, 300, 350, 400, 450, or 500 nucleotides). In some embodiments, the tailing region is or includes a poly A tail. Where the tailing region is a polyA tail, the length may be determined in units of or as a function of polyA Binding Protein binding. In this embodiment, the poly A tail is long enough to bind at least 4 monomers of PolyA Binding Protein. PolyA Binding Protein monomers bind to stretches of approximately 38 nucleotides. As such, it has been observed that polyA tails of about 80 nucleotides and 160 nucleotides are functional. In some embodiments, the poly-A tail is at least 160 nucleotides in length.

[0335] In some embodiments, the mRNA polynucleotide includes a stabilization element. In some embodiments, the stabilization element is a histone stem-loop. In some embodiments, the stabilization element is a nucleic acid sequence having increased GC content relative to wild type sequence.

[0336] In an embodiment, it is desirable to reduce the immunogenic sequence motifs of the mRNA for delivery. Exemplary techniques are known in the art, see, e.g., International Patent Publication WO/2020/033720, discussing exemplary immunogenic sequence motifs for removal, including those that can bind human TLR8), incorporated herein by reference.

[0337] The isolated mRNA(s) can be made in part or using only in vitro transcription. Methods of making polynucleotides by in vitro transcription are known in the art and are described in U.S. Provisional Patent Application Nos. 61/618,862, 61/681,645, 61/737,130, 61/618,866, 61/681,647, 61/737,134, 61/618,868, 61/681,648, 61/737,135, 61/618,873, 61/681,650, 61/737,147, 61/618,878, 61/681,654, 61/737,152, 61/618,885, 61/681,658, 61/737,155, 61/618,896, 61/668,157, 61/681,661, 61/737,160, 61/618,911, 61/681,667, 61/737,168, 61/618,922, 61/681,675, 61/737,174, 61/618,935, 61/681,687, 61/737,184, 61/618,945, 61/681,696, 61/737,191, 61/618,953, 61/681,704 61/737,203; International Publication Nos WO2013151666, WO2013151668, WO2013151663. WO2013151669, WO2013151670, WO2013151664, WO2013151665, WO2013151736, WO2013151672, WO2013151671 WO2013151667, and WO/2020/205793A1; the contents of each of which are herein incorporated by reference in their entireties. Cell-free production methods of making ribonucleic acid, including large scale syntheses are described, for example in U.S. Pat. No. 10,954,541, incorporated herein by reference in its entirety.

[0338] Targeted delivery of mRNA and endosomal escape are generally requirements of effective mRNA use. Lipids, including lipid nanoparticles, lipid-like materials, polymers are particularly preferred delivery vehicles, as detailed elsewhere herein.

### Cargos

[0339] The delivery systems may comprise one or more cargos. The cargos may comprise one or more components of the systems and compositions herein. A cargo may comprise one or more of the following: i) a plasmid encoding one or more proteins components in the compositions and systems such as the TnpB polypeptide and/or functional domains; ii) a plasmid encoding one or more nucleic acid components, iii) mRNA of one or more one or more proteins components in the compositions and systems such as the TnpB polypeptide and/or functional domains; iv) one or more nucleic acid component molecules; v) one or more proteins components in the compositions and systems such as the TnpB polypeptide and/or functional domains; vi) any combination thereof. The one or more protein components may include the nuclei acid-guided nuclease (e.g., Cas), reverse transcriptase, nucleotide deaminase, retrotransposon protein, other functional domain, or any combination thereof.

[0340] In some examples, a cargo may comprise a plasmid encoding one or more proteins components in the compositions and systems such as the TnpB polypeptide and/or functional domains and one or more (e.g., a plurality of) nucleic acid component molecules. In some cases, the plasmid may also encode a recombination template (e.g., for HDR). In one embodiment, a cargo may comprise mRNA encoding one or more protein components and one or more nucleic acid component molecules.

[0341] In some examples, a cargo may comprise one or more protein components and one or more nucleic acid component molecules, e.g., in the form of ribonucleoprotein complexes (RNP). The ribonucleoprotein complexes may be delivered by methods and systems herein. In some cases, the ribonucleoprotein may be delivered by way of a polypeptide-based shuttle agent. In one example, the ribonucleoprotein may be delivered using synthetic peptides comprising an endosome leakage domain (ELD) operably linked to a cell penetrating domain (CPD), to a histidine-rich domain and a CPD, e.g., as describe in WO2016161516. RNP may also be used for delivering the compositions and systems to plant cells, e.g., as described in Wu J W, et al., Nat Biotechnol. 2015 November; 33(11):1162-4.

### Physical Delivery

[0342] In one embodiment, the cargos may be introduced to cells by physical delivery methods. Examples of physical methods include microinjection, electroporation, and hydrodynamic delivery. Both nucleic acid and proteins may be delivered using such methods. For example, one or more protein components may be prepared in vitro, isolated, (refolded, purified if needed), and introduced to cells.

### Microinjection

[0343] Microinjection of the cargo directly to cells can achieve high efficiency, e.g., above 90% or about 100%. In one embodiment, microinjection may be performed using a microscope and a needle (e.g., with 0.5-5.0 μm in diameter) to pierce a cell membrane and deliver the cargo directly to a target site within the cell. Microinjection may be used for in vitro and ex vivo delivery.

[0344] Plasmids comprising coding sequences for one or more protein components and/or nucleic acid components, mRNAs, and/or nucleic acid component molecules, may be microinjected. In some cases, microinjection may be used i) to deliver DNA directly to a cell nucleus, and/or ii) to deliver mRNA (e.g., in vitro transcribed) to a cell nucleus or cytoplasm. In certain examples, microinjection may be used to delivery nucleic acid component directly to the nucleus and mRNA to the cytoplasm, e.g., facilitating translation and shuttling of one or more protein components to the nucleus.

[0345] Microinjection may be used to generate genetically modified animals. For example, gene editing cargos may be injected into zygotes to allow for efficient germline modification. Such approach can yield normal embryos and full-term mouse pups harboring the desired modification(s). Microinjection can also be used to provide transiently up- or down-regulate a specific gene within the genome of a cell, e.g., using TnpB.

### Electroporation

[0346] In one embodiment, the cargos and/or delivery vehicles may be delivered by electroporation. Electroporation may use pulsed high-voltage electrical currents to transiently open nanometer-sized pores within the cellular membrane of cells suspended in buffer, allowing for components with hydrodynamic diameters of tens of nanometers to flow into the cell. In some cases, electroporation may be used on various cell types and efficiently transfer cargo into cells. Electroporation may be used for in vitro and ex vivo delivery.

[0347] Electroporation may also be used to deliver the cargo to into the nuclei of mammalian cells by applying specific voltage and reagents, e.g., by nucleofection. Such approaches include those described in Wu Y, et al. (2015). Cell Res 25:67-79; Ye L, et al. (2014). Proc Natl Acad Sci USA 111:9591-6; Choi P S, Meyerson M. (2014). Nat Commun 5:3728; Wang J, Quake S R. (2014). Proc Natl Acad Sci 111:13157-62. Electroporation may also be used to deliver the cargo in vivo, e.g., with methods described in Zuckermann M, et al. (2015). Nat Commun 6:7391.

### Hydrodynamic Delivery

[0348] Hydrodynamic delivery may also be used for delivering the cargos, e.g., for in vivo delivery. In some examples, hydrodynamic delivery may be performed by rapidly pushing a large volume (8-10% body weight) solution containing the gene editing cargo into the bloodstream of a subject (e.g., an animal or human), e.g., for mice, via the tail vein. As blood is incompressible, the large bolus of liquid may result in an increase in hydrodynamic pressure that temporarily enhances permeability into endothelial and parenchymal cells, allowing for cargo not normally capable of crossing a cellular membrane to pass into cells. This approach may be used for delivering naked DNA plasmids and proteins. The delivered cargos may be enriched in liver, kidney, lung, muscle, and/or heart.

### Transfection

[0349] The cargos, e.g., nucleic acids, may be introduced to cells by transfection methods for introducing nucleic acids into cells. Examples of transfection methods include calcium phosphate-mediated transfection, cationic transfection, liposome transfection, dendrimer transfection, heat shock transfection, magnetofection, lipofection, impalefection, optical transfection, proprietary agent-enhanced uptake of nucleic acid.

### Delivery Vehicles

[0350] The delivery systems may comprise one or more delivery vehicles. The delivery vehicles may deliver the cargo into cells, tissues, organs, or organisms (e.g., animals or plants). The cargos may be packaged, carried, or otherwise associated with the delivery vehicles. The delivery vehicles may be selected based on the types of cargo to be delivered, and/or the delivery is in vitro and/or in vivo. Examples of delivery vehicles include vectors, viruses, non-viral vehicles, and other delivery reagents described herein.

[0351] The delivery vehicles in accordance with the present invention may have a greatest dimension (e.g., diameter) of less than 100 microns (μm). In one embodiment, the delivery vehicles have a greatest dimension of less than 10 μm. In one embodiment, the delivery vehicles may have a greatest dimension of less than 2000 nanometers (nm). In one embodiment, the delivery vehicles may have a greatest dimension of less than 1000 nanometers (nm). In one embodiment, the delivery vehicles may have a greatest dimension (e.g., diameter) of less than 900 nm, less than 800 nm, less than 700 nm, less than 600 nm, less than 500 nm, less than 400 nm, less than 300 nm, less than 200 nm, less than 150 nm, or less than 100 nm, less than 50 nm. In one embodiment, the delivery vehicles may have a greatest dimension ranging between 25 nm and 200 nm.

[0352] In one embodiment, the delivery vehicles may be or comprise particles. For example, the delivery vehicle may be or comprise nanoparticles (e.g., particles with a greatest dimension (e.g., diameter) no greater than 1000 nm. The particles may be provided in different forms, e.g., as solid particles (e.g., metal such as silver, gold, iron, titanium), non-metal, lipid-based solids, polymers), suspensions of particles, or combinations thereof. Metal, dielectric, and semiconductor particles may be prepared, as well as hybrid structures (e.g., core-shell particles). Nanoparticles may also be used to deliver the compositions and systems to plant cells, e.g., as described in International Patent Publication No. WO 2008042156, US Publication Application No. US 20130185823, and International Patent Publication No WO 2015/089419.

### Vectors

[0353] The systems, compositions, and/or delivery systems may comprise one or more vectors. The present disclosure also includes vector systems. A vector system may comprise one or more vectors. In one embodiment, a vector refers to a nucleic acid molecule capable of transporting another nucleic acid to which it has been linked. Vectors include nucleic acid molecules that are single-stranded, double-stranded, or partially double-stranded; nucleic acid molecules that comprise one or more free ends, no free ends (e.g., circular); nucleic acid molecules that comprise DNA, RNA, or both; and other varieties of polynucleotides known in the art. A vector may be a plasmid, e.g., a circular double stranded DNA loop into which additional DNA segments can be inserted, such as by standard molecular cloning techniques. Certain vectors may be capable of autonomous replication in a host cell into which they are introduced (e.g., bacterial vectors having a bacterial origin of replication and episomal mammalian vectors). Some vectors (e.g., non-episomal mammalian vectors) are integrated into the genome of a host cell upon introduction into the host cell, and thereby are replicated along with the host genome. In certain examples, vectors may be expression vectors, e.g., capable of directing the expression of genes to which they are operatively-linked. In some cases, the expression vectors may be for expression in eukaryotic cells. Common expression vectors of utility in recombinant DNA techniques are often in the form of plasmids.

[0354] Examples of vectors include pGEX, pMAL, pRIT5, E. coli expression vectors (e.g., pTrc, pET 11d, yeast expression vectors (e.g., pYepSec1, pMFa, pJRY88, pYES2, and picZ, Baculovirus vectors (e.g., for expression in insect cells such as SF9 cells) (e.g., pAc series and the pVL series), mammalian expression vectors (e.g., pCDM8 and pMT2PC).

[0355] A vector may comprise i) one or more protein components encoding sequence(s), and/or ii) a single, or at least 2, at least 3, at least 4, at least 5, at least 6, at least 7, at least 8, at least 9, at least 10, at least 12, at least 14, at least 16, at least 32, at least 48, at least 50 nucleic acid component molecule(s) encoding sequences. In a single vector there can be a promoter for each RNA coding sequence. Alternatively or additionally, in a single vector, there may be a promoter controlling (e.g., driving transcription and/or expression) multiple RNA encoding sequences.

[0356] Furthermore, that compositions or systems may be delivered via a vector, e.g., a separate vector or the same vector that is encoding the complex. When provided by a separate vector, the RNA that targets TnpB polypeptide expression can be administered sequentially or simultaneously. When administered sequentially, the RNA that targets TnpB polypeptide expression is to be delivered after the RNA that is intended for e.g., gene editing or gene engineering. This period may be a period of minutes (e.g., 5 minutes, 10 minutes, 20 minutes, 30 minutes, 45 minutes, 60 minutes). This period may be a period of hours (e.g., 2 hours, 4 hours, 6 hours, 8 hours, 12 hours, 24 hours). This period may be a period of days (e.g., 2 days, 3 days, 4 days, 7 days). This period may be a period of weeks (e.g., 2 weeks, 3 weeks, 4 weeks). This period may be a period of months (e.g., 2 months, 4 months, 8 months, 12 months). This period may be a period of years (2 years, 3 years, 4 years). In this fashion, the TnpB polypeptide associates with a first nucleic acid component molecule capable of hybridizing to a first target, such as a genomic locus or loci of interest and undertakes the function(s) desired of the system (e.g., gene engineering); and subsequently the TnpB polypeptide may then associate with the second nucleic acid component molecule capable of hybridizing to the sequence comprising at least part of the TnpB polypeptide. Where the nucleic acid component molecule targets the sequences encoding expression of the TnpB polypeptide, the enzyme becomes impeded, and the system becomes self-inactivating. In the same manner, RNA that targets TnpB polypeptide expression applied via, for example liposome, lipofection, particles, microvesicles as explained herein, may be administered sequentially or simultaneously. Similarly, self-inactivation may be used for inactivation of one or more nucleic acid component molecule used to target one or more targets.

### Regulatory Elements

[0357] A vector may comprise one or more regulatory elements. The regulatory element(s) may be operably linked to coding sequences of TnpB polypeptide, accessory proteins, nucleic acid component scaffold and/or nucleic acid component molecule or combination thereof. The term “operably linked” is intended to mean that the nucleotide sequence of interest is linked to the regulatory element(s) in a manner that allows for expression of the nucleotide sequence (e.g., in an in vitro transcription/translation system or in a host cell when the vector is introduced into the host cell). In certain examples, a vector may comprise: a first regulatory element operably linked to a nucleotide sequence encoding a TnpB polypeptide, and a second regulatory element operably linked to a nucleotide sequence encoding a nucleic acid component molecule.

[0358] Examples of regulatory elements include promoters, enhancers, internal ribosomal entry sites (IRES), and other expression control elements (e.g., transcription termination signals, such as polyadenylation signals and poly-U sequences). Such regulatory elements are described, for example, in Goeddel, GENE EXPRESSION TECHNOLOGY: METHODS IN ENZYMOLOGY 185, Academic Press, San Diego, Calif. (1990). Regulatory elements include those that direct constitutive expression of a nucleotide sequence in many types of host cell and those that direct expression of the nucleotide sequence only in certain host cells (e.g., tissue-specific regulatory sequences). A tissue-specific promoter may direct expression primarily in a desired tissue of interest, such as muscle, neuron, bone, skin, blood, specific organs (e.g., liver, pancreas), or particular cell types (e.g., lymphocytes). Regulatory elements may also direct expression in a temporal-dependent manner, such as in a cell-cycle dependent or developmental stage-dependent manner, which may or may not also be tissue or cell-type specific.

[0359] Examples of promoters include one or more pol III promoter (e.g., 1, 2, 3, 4, 5, or more pol III promoters), one or more pol II promoters (e.g., 1, 2, 3, 4, 5, or more pol II promoters), one or more pol I promoters (e.g., 1, 2, 3, 4, 5, or more pol I promoters), or combinations thereof. Examples of pol III promoters include, but are not limited to, U6 and H1 promoters. Examples of pol II promoters include, but are not limited to, the retroviral Rous sarcoma virus (RSV) LTR promoter (optionally with the RSV enhancer), the cytomegalovirus (CMV) promoter (optionally with the CMV enhancer), the SV40 promoter, the dihydrofolate reductase promoter, the β-actin promoter, the phosphoglycerol kinase (PGK) promoter, and the EF1α promoter.

### Viral Vectors

[0360] The cargos may be delivered by viruses. In one embodiment, viral vectors are used. A viral vector may comprise virally-derived DNA or RNA sequences for packaging into a virus (e.g., retroviruses, replication defective retroviruses, adenoviruses, replication defective adenoviruses, and adeno-associated viruses). Viral vectors also include polynucleotides carried by a virus for transfection into a host cell. Viruses and viral vectors may be used for in vitro, ex vivo, and/or in vivo deliveries.

### Adeno Associated Virus (AAV)

[0361] The systems and compositions herein may be delivered by adeno associated virus (AAV). AAV vectors may be used for such delivery. AAV, of the Dependovirus genus and Parvoviridae family, is a single stranded DNA virus. In one embodiment, AAV may provide a persistent source of the provided DNA, as AAV delivered genomic material can exist indefinitely in cells, e.g., either as exogenous DNA or, with some modification, be directly integrated into the host DNA. In one embodiment, AAV do not cause or relate with any diseases in humans. The virus itself is able to efficiently infect cells while provoking little to no innate or adaptive immune response or associated toxicity.

[0362] Examples of AAV that can be used herein include AAV-1, AAV-2, AAV-3, AAV-4, AAV-5, AAV-6, AAV-8, and AAV-9. The type of AAV may be selected with regard to the cells to be targeted; e.g., one can select AAV serotypes 1, 2, 5 or a hybrid capsid AAV1, AAV2, AAV5 or any combination thereof for targeting brain or neuronal cells; and one can select AAV4 for targeting cardiac tissue. AAV8 is useful for delivery to the liver. AAV-2-based vectors were originally proposed for CFTR delivery to CF airways, other serotypes such as AAV-1, AAV-5, AAV-6, and AAV-9 exhibit improved gene transfer efficiency in a variety of models of the lung epithelium. Examples of cell types targeted by AAV are described in Grimm, D. et al, J. Virol. 82:5887-5911 (2008)), and shown as follows in Table 3:

TABLE 3

| Cell Line | AAV-1 | AAV-2 | AAV-3 | AAV-4 | AAV-5 | AAV-6 | AAV-8 | AAV-9 |
|---|---|---|---|---|---|---|---|---|
| Huh-7 | 13 | 100 | 2.5 | 0.0 | 0.1 | 10 | 0.7 | 0.0 |
| HEK293 | 25 | 100 | 2.5 | 0.1 | 0.1 | 5 | 0.7 | 0.1 |
| HeLa | 3 | 100 | 2.0 | 0.1 | 6.7 | 1 | 0.2 | 0.1 |
| HepG2 | 3 | 100 | 16.7 | 0.3 | 1.7 | 5 | 0.3 | ND |
| Hep1A | 20 | 100 | 0.2 | 1.0 | 0.1 | 1 | 0.2 | 0.0 |
| 911 | 17 | 100 | 11 | 0.2 | 0.1 | 17 | 0.1 | ND |
| CHO | 100 | 100 | 14 | 1.4 | 333 | 50 | 10 | 1.0 |
| COS | 33 | 100 | 33 | 3.3 | 5.0 | 14 | 2.0 | 0.5 |
| MeWo | 10 | 100 | 20 | 0.3 | 6.7 | 10 | 1.0 | 0.2 |
| NIH3T3 | 10 | 100 | 2.9 | 2.9 | 0.3 | 10 | 0.3 | ND |
| A549 | 14 | 100 | 20 | ND | 0.5 | 10 | 0.5 | 0.1 |
| HT1180 | 20 | 100 | 10 | 0.1 | 0.3 | 33 | 0.5 | 0.1 |
| Monocytes | 1111 | 100 | ND | ND | 125 | 1429 | ND | ND |
| Immature DC | 2500 | 100 | ND | ND | 222 | 2857 | ND | ND |
| Mature DC | 2222 | 100 | ND | ND | 333 | 3333 | ND | ND |

[0363] The AAV particles may be created in HEK 293 T cells. Once particles with specific tropism have been created, they are used to infect the target cell line much in the same way that native viral particles do. This may allow for persistent presence of the components in the infected cell type, and what makes this version of delivery particularly suited to cases where long-term expression is desirable. Examples of doses and formulations for AAV that can be used include those describe in U.S. Pat. Nos. 8,454,972 and 8,404,658.

[0364] Various strategies may be used for delivery the systems and compositions herein with AAVs. In some examples, coding sequences of TnpB polypeptide and nucleic acid component may be packaged directly onto one DNA plasmid vector and delivered via one AAV particle. In some examples, AAVs may be used to deliver nucleic acid components into cells that have been previously engineered to express TnpB polypeptide. In some examples, coding sequences of TnpB polypeptide and nucleic acid component may be made into two separate AAV particles, which are used for co-transfection of target cells. In some examples, markers, tags, and other sequences may be packaged in the same AAV particles as coding sequences of TnpB polypeptide and/or nucleic acid components.

### Lentiviruses

[0365] The systems and compositions herein may be delivered by lentiviruses. Lentiviral vectors may be used for such delivery. Lentiviruses are complex retroviruses that have the ability to infect and express their genes in both mitotic and post-mitotic cells.

[0366] Examples of lentiviruses include human immunodeficiency virus (HIV), which may use its envelope glycoproteins of other viruses to target a broad range of cell types; minimal non-primate lentiviral vectors based on the equine infectious anemia virus (EIAV), which may be used for ocular therapies. In one embodiment, self-inactivating lentiviral vectors with an siRNA targeting a common exon shared by HIV tat/rev, a nucleolar-localizing TAR decoy, and an anti-CCR5-specific hammerhead ribozyme (see, e.g., DiGiusto et al. (2010) Sci Transl Med 2: 36ra43) may be used/and or adapted to the TnpB system herein.

[0367] Lentiviruses may be pseudo-typed with other viral proteins, such as the G protein of vesicular stomatitis virus. In doing so, the cellular tropism of the lentiviruses can be altered to be as broad or narrow as desired. In some cases, to improve safety, second- and third-generation lentiviral systems may split essential genes across three plasmids, which may reduce the likelihood of accidental reconstitution of viable viral particles within cells.

[0368] In some examples, leveraging the integration ability, lentiviruses may be used to create libraries of cells comprising various genetic modifications, e.g., for screening and/or studying genes and signaling pathways.

### Adenoviruses

[0369] The systems and compositions herein may be delivered by adenoviruses. Adenoviral vectors may be used for such delivery. Adenoviruses include nonenveloped viruses with an icosahedral nucleocapsid containing a double stranded DNA genome. Adenoviruses may infect dividing and non-dividing cells. In one embodiment, adenoviruses do not integrate into the genome of host cells, which may be used for limiting off-target effects of systems in gene editing applications.

### Viral Vehicles for Delivery to Plants

[0370] The systems and compositions may be delivered to plant cells using viral vehicles. In particular embodiments, the compositions and systems may be introduced in the plant cells using a plant viral vector (e.g., as described in Scholthof et al. 1996, Annu Rev Phytopathol. 1996; 34:299-323). Such viral vector may be a vector from a DNA virus, e.g., geminivirus (e.g., cabbage leaf curl virus, bean yellow dwarf virus, wheat dwarf virus, tomato leaf curl virus, maize streak virus, tobacco leaf curl virus, or tomato golden mosaic virus) or nanovirus (e.g., Faba bean necrotic yellow virus). The viral vector may be a vector from an RNA virus, e.g., tobravirus (e.g., tobacco rattle virus, tobacco mosaic virus), potexvirus (e.g., potato virus X), or hordeivirus (e.g., barley stripe mosaic virus). The replicating genomes of plant viruses may be non-integrative vectors.

### Non-Viral Vehicles

[0371] The delivery vehicles may comprise non-viral vehicles. In general, methods and vehicles capable of delivering nucleic acids and/or proteins may be used for delivering the systems compositions herein. Examples of non-viral vehicles include lipid nanoparticles, cell-penetrating peptides (CPPs), DNA nanoclews, gold nanoparticles, streptolysin O, multifunctional envelope-type nanodevices (MENDs), lipid-coated mesoporous silica particles, and other inorganic nanoparticles. Targeted delivery of RNA and endosomal escape are generally requirements of effective RNA use. Lipids, including lipid nanoparticles, lipid-like materials, polymers are particularly preferred delivery vehicles for RNA, as detailed further below.

### Nanoparticles

[0372] Delivery vehicles for use with the present compositions may comprise nanoparticles including lipid nanoparticles. Other particle systems, including polymer-based materials such as calcium phosphate-silicate nanoparticle, a calcium phosphate nanoparticle, a silica nanoparticle, and poly(amido-amine), poly-beta amino-esters (PBAEs), and polyethylenimine (PEI) can be used. See, e.g., Trepotec et al. Mol. Therapy 27:4 Apr. 2019. In an embodiment, the exemplary nanoparticle comprises modified dendrimers comprising cores, one or more of homogeneous or heterogeneous intermediate and terminal layers for the enclosure and delivery of nucleic acid, e.g., mRNA. Modified dendrimers can preferably comprise one or more polyester dendrimers, for example, comprising a core branching into one or more generations of polyester units, with polyester attached at surface via amine linkers (e.g., polyamine) to hydrophobic units (e.g., fatty acid derivative), including polyamidoamine (PAMAM) dendrimers, polypropylene imine (PPI) dendrimers, or polyethylene imine (PEI) dendrimers. The plurality of intermediate layers may comprise both at least one layer modified for endosomal escape and a polyfluorocarbon. Exemplary molecules and methods of making can be found in WO/2020/132196, and WO 2021/207020, incorporated herein by reference. Formulas IB, II and III of International Patent Publication WO 2021/207020 are specifically incorporated herein by reference as exemplary nanoparticle delivery vehicles for the delivery of nucleic acids.

### Lipid Particles

[0373] The delivery vehicles may comprise lipid particles, e.g., lipid nanoparticles (LNPs) and liposomes. Lipidic aminoglycosides and derivatives thereof are known in the art for delivery of RNA, including dioleylamine-A-succinyl-neomycin (“DOSN”), dioleylamine-A-succinyl-paromomycin (“DOSP”), NeoCHol. NeoSucChol, ParomoChol. ParomoCapSucDOLA, ParamoLysSucDOLA, NeoDiSucDODA, NeodiLysSucDOLA, and [ParomoLys] 2-Glu-Lys-[SucDOLA] 2 as detailed in International Patent Publication WO 2008/040792, incorporated herein by reference.

### Lipid Nanoparticles (LNPs)

[0374] LNPs may encapsulate nucleic acids within cationic lipid particles (e.g., liposomes), and may be delivered to cells with relative ease. In some examples, lipid nanoparticles do not contain any viral components, which helps minimize safety and immunogenicity concerns. Lipid particles may be used for in vitro, ex vivo, and in vivo deliveries. Lipid particles may be used for various scales of cell populations.

[0375] In some examples. LNPs may be used for delivering DNA molecules (e.g., those comprising coding sequences of TnpB polypeptide and/or nucleic acid component) and/or RNA molecules (e.g., mRNA of TnpB polypeptide, nucleic acid component molecules). In certain cases, LNPs may be use for delivering RNP complexes of TnpB polypeptide/nucleic acid component.

[0376] Cationic lipids form complexes with mRNA to form a lipoplex which is then endocytosed by cells. In an example embodiment, the LNP comprises a cationic lipid, a helper lipid, cholesterol, and polyethylene glycol (PEG). In an example embodiment, the LNP can comprise paromomycin-based cationic lipids, with either an amide or a phosphoramide linker, and on the other hand two imidazole-based neutral lipids, having as well either an amide or a phosphoramide function as linker. In an embodiment, assemblies can be obtained when the cationic and helper lipids comprise different linkers. See, Colombani, et al., Self-assembling complexes between binary mixtures of lipids with different linkers and nucleic acids promote universal mRNA, DNA, and siRNA delivery. J. Control Release. (2017) doi: 10.1016/j.jconrel.2017.01.041

[0377] In an embodiment, the nanoparticles can be developed according to selective organ targeting (SORT) wherein multiple classes of lipid nanoparticles are systematically engineered to exclusively edit extrahepatic tissues via addition of a supplemental SORT molecule. See, e.g., Cheng et al., Nature Nanotechnology 15, 313-320 2020). The approach has been shown with dendrimer lipid nanoparticles (DLNPs), stable nucleic acid lipid particles (SNALPs), and lipid-like nanoparticles (LLNPs), including with use of ionizable cationic lipids (5A2-SC8, C12-200, or DLin-MC3-DMA)36,48,49, zwitterionic lipids (DOPE or DSPC), cholesterol, DMG-PEG, and permanently cationic lipids (DOTAP, DDAB or EPC). Wei et al., Systemic nanoparticle delivery of CRISPR-Cas9 ribonucleproteins for effective tissue specific genome editing., Nature Comm. (2020) 11:3232, doi:10.1038/s4146020170293, incorporated herein by reference.

[0378] In one embodiment, the composition comprises a plurality of lipid nanoparticles comprising a cationic lipid, a neutral lipid, a cholesterol, a PEG lipid, or a combination thereof, wherein the plurality of lipid nanoparticles optionally has a mean particle size of between 80 nm and 160 nm; and wherein the lipid nanoparticles comprise one or more polynucleotides encoding at least one polypeptide of the present invention, e.g., TnpB polypeptide.

[0379] Components in LNPs may comprise cationic lipids 1,2-dilineoyl-3-dimethylammonium-propane (DLinDAP), 1,2-dilinoleyloxy-3-N,N-dimethylaminopropane (DLinDMA), 1,2-dilinoleyloxyketo-N,N-dimethyl-3-aminopropane (DLinK-DMA), 1,2-dilinoleyl-4-(2-dimethylaminoethyl)-[1,3]-dioxolane (DLinKC2-DMA), (3-o-[2″-(methoxypolyethyleneglycol 2000) succinoyl]-1,2-dimyristoyl-sn-glycol (PEG-S-DMG), R-3-[(ro-methoxy-poly(ethylene glycol) 2000) carbamoyl]-1,2-dimyristyloxlpropyl-3-amine (PEG-C-DOMG, and any combination thereof. Preparation of LNPs and encapsulation may be adapted from Rosin et al, Molecular Therapy, vol. 19, no. 12, pages 1286-220 December 2011).

[0380] Further cationic lipids may comprise di-O-octadecenyl-3-trimethylammonium-propane, (DOTMA), 1,2-dioleoyl-sn-glycero-3-phosphoethanolamine (DOPE), 1,2-dioleoyl-3-trimethylammonium-propane (DOTAP), a biodegradable analogue of DOTMA, alone or in combination with further materials such as, for example, cholesterol. Such Cationic lipid LNPs can be delivered as, for example, nanoemulsions and may further incorporate carbonate apatite (increase interaction between particles and cell membranes), or with conjugation with fibronectin, accelerating endocytosis. Other quaternary ammonium lipids, such as Dimethyldioctadecylammonium bromide (DDAB) are also 2,3-dioleyloxy-N-[2-(sperminecarboxamido) ethyl]-N,N-dimethyl-1-propanaminium trifluoroacetate (DOSPA) are also contemplated for use in delivery.

[0381] Lipid nanoparticles for mRNA delivery can comprise 2-(((((3S,8S,9S,10R,13R,14S, 17R)-10,13-dimethyl-17-((R)-6-methylheptan-2-yl)-2,3,4,7,8,9,10,11,12,13,14,15,16,17-tetradecahydro-1-H-cyclopenta[a]phenanthren-3-yl)oxy)carbonyl)amino)-N,N-bis(2-hydroxyethyl)-N-methylethan-1-aminium bromide (BHEM-Cholesterol). See, Zhang, Y. et al. In situ repurposing of dendritic cells with CRISPR/Cas9-based nanomedicine to induce transplant tolerance. Biomaterials 217, 119302 (2019), incorporated herein by reference.

[0382] In some embodiments, the lipid nanoparticle comprises a molar ratio of 20-60% ionizable cationic lipid, 5-25% non-cationic lipid, 25-55% sterol, and 0.5-15% PEG-modified lipid.

[0383] In some embodiments, the lipid nanoparticle is any nanoparticle described in U.S. Pat. No. 10,442,756, and/or comprises any compound described in U.S. Pat. No. 10,442,756, including but not limited to a nanoparticle according to any one of Formulas (IA) or (II) described therein.

[0384] In some embodiments, the lipid nanoparticle is any nanoparticle described in e.g., U.S. Pat. No. 10,266,485, and/or comprises any compound described in U.S. Pat. No. 10,266,485, including but not limited to a nanoparticle according to Formula (II) described therein.

[0385] In some embodiments, the lipid nanoparticle is a nanoparticle described in U.S. Pat. No. 9,868,692, and/or comprises a compound described in e.g., U.S. Pat. No. 9,868,692, including but not limited to a nanoparticle according to Formula (I), (1A), (II), (IIa), (IIb), (IIc), (IId), (IIe),

[0386] In some embodiments, a lipid nanoparticle comprises compounds of Formula (I) and/or Formula (II) as described in U.S. patent Ser. No. 10/272,150.

[0387] In some embodiments, the mRNA is formulated in a lipid nanoparticle that comprises a compound selected from Compounds 3, 18, 20, 25, 26, 29, 30, 60, 108-112 and 122 of U.S. Pat. No. 10,272,150.

[0388] In some embodiments, at least 80% (e.g., 85%, 90%, 95%, 98%, 99%) of the uracil in the open reading frame have a chemical modification, optionally wherein the vaccine is formulated in a lipid nanoparticle (e.g., a lipid nanoparticle comprises a cationic lipid, a PEG-modified lipid, a sterol, and a non-cationic lipid).

[0389] In some embodiments, the lipid nanoparticle has a mean diameter of 50-200 nm.

[0390] In some embodiments, a lipid nanoparticle comprises Compounds 3, 18, 20, 25, 26, 29, 30, 60, 108-112, or 122 as set forth in U.S. patent Ser. No. 10/272,150.

[0391] In some embodiments, the lipid nanoparticle has a polydispersity value of less than 0.4 (e.g., less than 0.3, 0.2 or 0.1).

[0392] In some embodiments, a plurality of lipid nanoparticles, such as when contained in a formulation, has a mean PDI of between 0.02 and 0.2. In some embodiments, a plurality of lipid nanoparticles, such as when contained in a formulation comprising one or more polynucleotide(s), has a mean lipid to polynucleotide ratio (wt/wt) of between 10 and 20.

[0393] In some embodiments, the lipid nanoparticle has a net neutral charge at a neutral pH value.

### Liposomes

[0394] In one embodiment, a lipid particle may be liposome. Liposomes are spherical vesicle structures composed of a uni- or multilamellar lipid bilayer surrounding internal aqueous compartments and a relatively impermeable outer lipophilic phospholipid bilayer. In one embodiment, liposomes are biocompatible, nontoxic, can deliver both hydrophilic and lipophilic drug molecules, protect their cargo from degradation by plasma enzymes, and transport their load across biological membranes and the blood brain barrier (BBB).

[0395] Liposomes can be made from several different types of lipids, e.g., phospholipids. A liposome may comprise natural phospholipids and lipids such as 1,2-distearoryl-sn-glycero-3-phosphatidyl choline (DSPC), sphingomyelin, egg phosphatidylcholines, monosialoganglioside, or any combination thereof.

[0396] Several other additives may be added to liposomes in order to modify their structure and properties. For instance, liposomes may further comprise cholesterol, sphingomyelin, and/or 1,2-dioleoyl-sn-glycero-3-phosphoethanolamine (DOPE), e.g., to increase stability and/or to prevent the leakage of the liposomal inner cargo.

[0397] In one embodiment, the liposome comprises a transport polymer, which may optionally be branched, comprising at least 10 amino acids and a ratio of histidine to non-histidine amino acids greater than 1.5 and less than 10. The branched transport polymer can comprise one or more backbones, one or more terminal branches, and optionally, one or more non-terminal branches. See, U.S. Pat. No. 7,070,807, incorporated herein by reference in its entirety. In one embodiment, the transport polymer is a Histidine-Lysine co-polymer (HKP) used to package and deliver mRNA and other cargos. See, U.S. Pat. Nos. 7,163,695, and 7,772,201, incorporated herein by reference in their entireties.

### Stable Nucleic-Acid-Lipid Particles (SNALPs)

[0398] In one embodiment, the lipid particles may be stable nucleic acid lipid particles (SNALPs). SNALPs may comprise an ionizable lipid (DLinDMA) (e.g., cationic at low pH), a neutral helper lipid, cholesterol, a diffusible polyethylene glycol (PEG)-lipid, or any combination thereof. In some examples, SNALPs may comprise synthetic cholesterol, dipalmitoylphosphatidylcholine, 3-N-[(w-methoxy polyethylene glycol) 2000) carbamoyl]-1,2-dimyrestyloxypropylamine, and cationic 1,2-dilinoleyloxy-3-N,N-dimethylaminopropane. In some examples, SNALPs may comprise synthetic cholesterol, 1,2-distearoyl-sn-glycero-3-phosphocholine, PEG-CDMA, and 1,2-dilinoleyloxy-3-(N;N-dimethyl)aminopropane (DLinDMA).

### Other Lipids

[0399] The lipid particles may also comprise one or more other types of lipids, e.g., cationic lipids, such as amino lipid 2,2-dilinoleyl-4-dimethylaminoethyl-[1,3]-dioxolane (DLin-KC2-DMA), DLin-KC2-DMA4, C12-200 and colipids disteroylphosphatidyl choline, cholesterol, and PEG-DMG.

### Lipoplexes/Polyplexes

[0400] In one embodiment, the delivery vehicles comprise lipoplexes and/or polyplexes. Lipoplexes may bind to negatively charged cell membrane and induce endocytosis into the cells. Examples of lipoplexes may be complexes comprising lipid(s) and non-lipid components. Examples of lipoplexes and polyplexes include FuGENE-6 reagent, a non-liposomal solution containing lipids and other components, zwitterionic amino lipids (ZALs), Ca2p (e.g., forming DNA/Ca²⁺ microcomplexes), polyethenimine (PEI) (e.g., branched PEI), and poly(L-lysine) (PLL). Core-shell structured lipoplyplex delivery platforms can also be used and are one preferred delivery for mRNA, particularly because the core-shell structured particle can protein and gradually release mRNA upon degradation of the polymers. See, U.S. Patent Publication 2018/0360756, incorporated herein by reference.

### Cell Penetrating Peptides

[0401] In one embodiment, the delivery vehicles comprise cell penetrating peptides (CPPs). CPPs are short peptides that facilitate cellular uptake of various molecular cargo (e.g., from nanosized particles to small chemical molecules and large fragments of DNA).

[0402] CPPs may be of different sizes, amino acid sequences, and charges. In some examples, CPPs can translocate the plasma membrane and facilitate the delivery of various molecular cargoes to the cytoplasm or an organelle. CPPs may be introduced into cells via different mechanisms, e.g., direct penetration in the membrane, endocytosis-mediated entry, and translocation through the formation of a transitory structure.

[0403] CPPs may have an amino acid composition that either contains a high relative abundance of positively charged amino acids such as lysine or arginine or has sequences that contain an alternating pattern of polar/charged amino acids and non-polar, hydrophobic amino acids. These two types of structures are referred to as polycationic or amphipathic, respectively. A third class of CPPs are the hydrophobic peptides, containing only apolar residues, with low net charge or have hydrophobic amino acid groups that are crucial for cellular uptake. Another type of CPPs is the trans-activating transcriptional activator (Tat) from Human Immunodeficiency Virus 1 (HIV-1). Examples of CPPs include to Penetratin, Tat (48-60), Transportan, and (R-AhX-R4) (Ahx refers to aminohexanoyl), Kaposi fibroblast growth factor (FGF) signal peptide sequence, integrin β3 signal peptide sequence, polyarginine peptide Args sequence, Guanine rich-molecular transporters, and sweet arrow peptide. Examples of CPPs and related applications also include those described in U.S. Pat. No. 8,372,951.

[0404] CPPs can be used for in vitro and ex vivo work quite readily, and extensive optimization for each cargo and cell type is usually required. In some examples, CPPs may be covalently attached to the TnpB polypeptide directly, which is then complexed with the nucleic acid component and delivered to cells. In some examples, separate delivery of CPP-TnpB and CPP-nucleic acid component to multiple cells may be performed. CPP may also be used to delivery RNPs.

[0405] CPPs may be used to deliver the compositions and systems to plants. In some examples, CPPs may be used to deliver the components to plant protoplasts, which are then regenerated to plant cells and further to plants.

### DNA Nanoclews

[0406] In one embodiment, the delivery vehicles comprise DNA nanoclews. A DNA nanoclew refers to a sphere-like structure of DNA (e.g., with a shape of a ball of yarn). The nanoclew may be synthesized by rolling circle amplification with palindromic sequences that aide in the self-assembly of the structure. The sphere may then be loaded with a payload. An example of DNA nanoclew is described in Sun W et al, J Am Chem Soc. 2014 Oct. 22; 136(42):14722-5; and Sun W et al, Angew Chem Int Ed Engl. 2015 Oct. 5; 54(41):12029-33. DNA nanoclew may have a palindromic sequences to be partially complementary to the nucleic acid component molecule within the TnpB polypeptide: nucleic acid component ribonucleoprotein complex. A DNA nanoclew may be coated, e.g., coated with PEI to induce endosomal escape.

### Gold Nanoparticles

[0407] In one embodiment, the delivery vehicles comprise gold nanoparticles (also referred to AuNPs or colloidal gold). Gold nanoparticles may form complex with cargos, e.g., TnpB polypeptide: nucleic acid component RNP. Gold nanoparticles may be coated, e.g., coated in a silicate and an endosomal disruptive polymer, PAsp(DET). Examples of gold nanoparticles include AuraSense Therapeutics' Spherical Nucleic Acid (SNA™) constructs, and those described in Mout R, et al. (2017). ACS Nano 11:2452-8; Lee K, et al. (2017). Nat Biomed Eng 1:889-901.

iTOP

[0408] In one embodiment, the delivery vehicles comprise iTOP. iTOP refers to a combination of small molecules drives the highly efficient intracellular delivery of native proteins, independent of any transduction peptide. iTOP may be used for induced transduction by osmocytosis and propanebetaine, using NaCl-mediated hyperosmolality together with a transduction compound (propanebetaine) to trigger macropinocytotic uptake into cells of extracellular macromolecules. Examples of iTOP methods and reagents include those described in D'Astolfo D S, Pagliero R J, Pras A, et al. (2015). Cell 161:674-690.

### Polymer-Based Particles

[0409] In one embodiment, the delivery vehicles may comprise polymer-based particles (e.g., nanoparticles). In one embodiment, the polymer-based particles may mimic a viral mechanism of membrane fusion. The polymer-based particles may be a synthetic copy of Influenza virus machinery and form transfection complexes with various types of nucleic acids ((siRNA, miRNA, plasmid DNA or snucleic acid component, mRNA) that cells take up via the endocytosis pathway, a process that involves the formation of an acidic compartment. The low pH in late endosomes acts as a chemical switch that renders the particle surface hydrophobic and facilitates membrane crossing. Once in the cytosol, the particle releases its payload for cellular action. This Active Endosome Escape technology is safe and maximizes transfection efficiency as it is using a natural uptake pathway. In one embodiment, the polymer-based particles may comprise alkylated and carboxyalkylated branched polyethylenimine. In some examples, the polymer-based particles are VIROMER, e.g., VIROMER RNAi, VIROMER RED, VIROMER mRNA. Example methods of delivering the systems and compositions herein include those described in Bawage S S et al., Synthetic mRNA expressed Cas13a mitigates RNA virus infections, biorxiv.org/content/10.1101/370460v1.full doi: doi.org/10.1101/370460, Viromer® RED, a powerful tool for transfection of keratinocytes. doi: 10.13140/RG.2.2.16993.61281, Viromer® Transfection Factbook 2018: technology, product overview, users' data., doi:10.13140/RG.2.2.23912.16642.

### Streptolysin O (SLO)

[0410] The delivery vehicles may be streptolysin O (SLO). SLO is a toxin produced by Group A streptococci that works by creating pores in mammalian cell membranes. SLO may act in a reversible manner, which allows for the delivery of proteins (e.g., up to 100 kDa) to the cytosol of cells without compromising overall viability. Examples of SLO include those described in Sierig G, et al. (2003). Infect Immun 71:446-55; Walev I, et al. (2001). Proc Natl Acad Sci USA 98:3185-90; Teng K W, et al. (2017). Elife 6: e25460.

### Multifunctional Envelope-Type Nanodevice (MEND)

[0411] The delivery vehicles may comprise multifunctional envelope-type nanodevice (MENDs). MENDs may comprise condensed plasmid DNA, a PLL core, and a lipid film shell. A MEND may further comprise cell-penetrating peptide (e.g., stearyl octaarginine). The cell penetrating peptide may be in the lipid shell. The lipid envelope may be modified with one or more functional components, e.g., one or more of: polyethylene glycol (e.g., to increase vascular circulation time), ligands for targeting of specific tissues/cells, additional cell-penetrating peptides (e.g., for greater cellular delivery), lipids to enhance endosomal escape, and nuclear delivery tags. In some examples, the MEND may be a tetra-lamellar MEND (T-MEND), which may target the cellular nucleus and mitochondria. In certain examples, a MEND may be a PEG-peptide-DOPE-conjugated MEND (PPD-MEND), which may target bladder cancer cells. Examples of MENDs include those described in Kogure K, et al. (2004). J Control Release 98:317-23; Nakamura T, et al. (2012). Acc Chem Res 45:1113-21.

### Lipid-Coated Mesoporous Silica Particles

[0412] The delivery vehicles may comprise lipid-coated mesoporous silica particles. Lipid-coated mesoporous silica particles may comprise a mesoporous silica nanoparticle core and a lipid membrane shell. The silica core may have a large internal surface area, leading to high cargo loading capacities. In one embodiment, pore sizes, pore chemistry, and overall particle sizes may be modified for loading different types of cargos. The lipid coating of the particle may also be modified to maximize cargo loading, increase circulation times, and provide precise targeting and cargo release. Examples of lipid-coated mesoporous silica particles include those described in Du X, et al. (2014). Biomaterials 35:5580-90; Durfee P N, et al. (2016). ACS Nano 10:8325-45.

### Inorganic Nanoparticles

[0413] The delivery vehicles may comprise inorganic nanoparticles. Examples of inorganic nanoparticles include carbon nanotubes (CNTs) (e.g., as described in Bates K and Kostarelos K. (2013). Adv Drug Deliv Rev 65:2023-33.), bare mesoporous silica nanoparticles (MSNPs) (e.g., as described in Luo G F, et al. (2014). Sci Rep 4:6064), and dense silica nanoparticles (SiNPs) (as described in Luo D and Saltzman W M. (2000). Nat Biotechnol 18:893-5).

### Exosomes

[0414] The delivery vehicles may comprise exosomes. Exosomes include membrane bound extracellular vesicles, which can be used to contain and delivery various types of biomolecules, such as proteins, carbohydrates, lipids, and nucleic acids, and complexes thereof (e.g., RNPs). Examples of exosomes include those described in Schroeder A, et al., J Intern Med. 2010 January; 267(1): 9-21; El-Andaloussi S, et al., Nat Protoc. 2012 December; 7(12):2112-26; Uno Y, et al., Hum Gene Ther. 2011 June; 22(6):711-9; Zou W, et al., Hum Gene Ther. 2011 April; 22(4):465-75. Exemplary exosomes can be generated from 293F cells, with mRNA-loaded exosomes driving higher mRNA expression than mRNA loaded LNPs in some instances. See, e.g., J. Biol. Chem. (2021) 297(5) 101266.

[0415] In some examples, the exosome may form a complex (e.g., by binding directly or indirectly) to one or more components of the cargo. In certain examples, a molecule of an exosome may be fused with first adapter protein and a component of the cargo may be fused with a second adapter protein. The first and the second adapter protein may specifically bind each other, thus associating the cargo with the exosome. Examples of such exosomes include those described in Ye Y, et al., Biomater Sci. 2020 Apr. 28. doi: 10.1039/d0bm00427h.

### Retrovirus Like Delivery Systems

[0416] The delivery vehicle may comprise a retro-virus like protein, such as PEG10, which is capable of incorporating a cargo into a virus-like particle. As such systems can be re-programmed to package specific cargos, polynucleotides encoding components of the TnpB systems disclosed herein may be further modified with a recognition sequence that leads to selective packaging of the TnpB components into such retro-virus like VLPs. Said VLPs may be further modified with fusogenic proteins that impart tissue or cell specificity. Example systems are disclosed in Segel et al. Mammalian retrovirus-like protein PEG10 packages its own mRNA and can be pseudotyped for mRNA delivery. 373 Science, 882-889 (2021), which is incorporated herein by reference. The harnessing of natural proteins that formvirus-like particles and can deliver mRNA cargo, or Selective Endogenous eNcapsidation for cellular Delivery (SEND), may reduce immunogenic response compared to other delivery approaches.

### Genetically Modified Cells and Organisms

[0417] The present disclosure further provides cells comprising one or more components of the compositions and systems herein, e.g., the TnpB polypeptide and/or nucleic acid component(s). Also provided include cells modified by the systems and methods herein, and cell cultures, tissues, organs, organism comprising such cells or progeny thereof. In one embodiment, the present disclosure provides a method of modifying a cell or organism. The cell may be a prokaryotic cell or a eukaryotic cell. The cell may be a mammalian cell. The mammalian cell many be a non-human primate, bovine, porcine, rodent or mouse cell. The cell may be a non-mammalian eukaryotic cell such as poultry, fish, or shrimp. The cell may be a therapeutic T cell or antibody-producing B-cell. The cell may also be a plant cell. The plant cell may be of a crop plant such as cassava, corn, sorghum, wheat, or rice. The plant cell may also be of an algae, tree, or vegetable. The modification introduced to the cell by the present invention may be such that the cell and progeny of the cell are altered for improved production of biologic products such as an antibody, starch, alcohol, or other desired cellular output. The modification introduced to the cell by the present invention may be such that the cell and progeny of the cell include an alteration that changes the biologic product produced.

[0418] In one embodiment, one or more polynucleotide molecules, vectors, or vector systems driving expression of one or more elements of the compositions, systems, or delivery systems comprising one or more elements of the TnpB system are introduced into a host cell such that expression of the elements of the TnpB system direct formation of a TnpB-targeting complex at one or more target sites. In one embodiment of the invention the host cell may be a eukaryotic cell, a prokaryotic cell, or a plant cell.

[0419] In particular embodiments, the host cell is a cell of a cell line. Cell lines are available from a variety of sources known to those with skill in the art (see, e.g., the American Type Culture Collection (ATCC) (Manassas, Va.)). In one embodiment, a cell transfected with one or more vectors described herein is used to establish a new cell line comprising one or more vector-derived sequences. In one embodiment, a cell transiently transfected with the components of a system as described herein (such as by transient transfection of one or more vectors, or transfection with RNA), and modified through the activity of a complex, is used to establish a new cell line comprising cells containing the modification but lacking any other exogenous sequence. In one embodiment, cells transiently or non-transiently transfected with one or more vectors described herein, or cell lines derived from such cells are used in assessing one or more test compounds.

[0420] Further intended are isolated human cells or tissues, plants or non-human animals comprising one or more of the polynucleotide molecules, vectors, vector systems, or cells described in any of the embodiments herein. In an aspect, host cells and cell lines modified by or comprising the compositions, systems or modified enzymes of present invention are provided, including (isolated) stem cells, and progeny thereof.

[0421] In one embodiment, the plants or non-human animals comprise at least one of the system components, polynucleotide molecules, vectors, vector systems, or cells described in any of the embodiments herein at least one tissue type of the plant or non-human animal. In one embodiment, non-human animals comprise at least one of the system components, polynucleotide molecules, vectors, vector systems, or cells described in any of the embodiments herein in at least one tissue type. In one embodiment, the presence of the system components is transient, in that they are degraded over time. In one embodiment, expression of the components of the systems and compositions described in any of the embodiments comprised in polynucleotide molecules, vectors, vector systems, or cells is limited to certain tissue types or regions in the plant or non-human animal. In one embodiment, the expression of the components of the systems and compositions described in any of the embodiments comprised in polynucleotide molecules, vectors, vector systems, or cells is dependent of a physiological cue. In one embodiment, expression of the components of the systems and compositions described in any of the embodiments comprised in polynucleotide molecules, vectors, vector systems, or cells may be triggered by an exogenous molecule. In one embodiment, expression of the components of the systems and compositions described in any of the embodiments comprised in polynucleotide molecules, vectors, vector systems, or cells is dependent on the expression of a non-TnpB molecule in the plant or non-human animal.

### Applications and Uses in General

[0422] The systems, the vector systems, the vectors and the compositions described herein may be used in various nucleic acids-targeting applications, altering or modifying synthesis of a gene product, such as a protein, nucleic acids cleavage, nucleic acids editing, nucleic acids splicing; trafficking of target nucleic acids, tracing of target nucleic acids, isolation of target nucleic acids, visualization of target nucleic acids, etc.

[0423] Aspects of the invention thus also encompass methods and uses of the compositions and systems described herein in genome engineering, e.g., for altering or manipulating the expression of one or more genes or the one or more gene products, in prokaryotic or eukaryotic cells, in vitro, in vivo or ex vivo. In some examples, the target polynucleotides are target sequences within genomic DNA, including nuclear genomic DNA, mitochondrial DNA, or chloroplast DNA.

[0424] Typically, in the context of a TnpB system, formation of a TnpB complex (comprising a nucleic acid component molecule (ωRNA) hybridized to a target sequence and complexed with one or more nucleic acid-targeting effector proteins) results in cleavage of one or both DNA or RNA strands in or near (e.g., within 1, 2, 3, 4, 5, 6, 7, 8, 9, 10, 20, 50, or more base pairs from) the target sequence. As used herein the term “sequence(s) associated with a target locus of interest” refers to sequences near the vicinity of the target sequence (e.g., within 1, 2, 3, 4, 5, 6, 7, 8, 9, 10, 20, 50, or more base pairs from the target sequence, wherein the target sequence is comprised within a target locus of interest).

[0425] In one embodiment, the present disclosure provides a method of targeting a polynucleotide, comprising contacting a sample (such as cell, population of cells, tissue, organ, or an organism) that comprises a target polynucleotide with the composition, systems, polynucleotide(s), or vector(s). The contacting may result in modification of a gene product or modification of the amount or expression of a gene product. In some examples, the target sequence of the polynucleotide is a disease-associated target sequence.

[0426] In one embodiment, the present disclosure provides a method of modifying target polynucleotides comprising delivering the composition, the one or more polynucleotides of 2, or one or more vectors to a cell or population of cells comprising the target polynucleotides, wherein the complex directs the reverse transcriptase to the target sequence and the reverse transcriptase facilitates insertion of the donor sequence from the nucleic acid component into the target polynucleotide.

[0427] Examples of target polynucleotides include a sequence associated with a signaling biochemical pathway, e.g., a signaling biochemical pathway-associated gene or polynucleotide. Examples of target polynucleotides include a disease associated gene or polynucleotide. A “disease-associated” gene or polynucleotide refers to any gene or polynucleotide which is yielding transcription or translation products at an abnormal level or in an abnormal form in cells derived from a disease-affected tissues compared with tissues or cells of a non-disease control. It may be a gene that becomes expressed at an abnormally high level; it may be a gene that becomes expressed at an abnormally low level, where the altered expression correlates with the occurrence and/or progression of the disease. A disease-associated gene also refers to a gene possessing mutation(s) or genetic variation that is directly responsible or is in linkage disequilibrium with a gene(s) that is responsible for the etiology of a disease. The transcribed or translated products may be known or unknown and may be at a normal or abnormal level.

[0428] The target polynucleotide of a complex can be any polynucleotide endogenous or exogenous to the eukaryotic cell. For example, the target polynucleotide can be a polynucleotide residing in the nucleus of the eukaryotic cell. The target polynucleotide can be a sequence coding a gene product (e.g., a protein) or a non-coding sequence (e.g., a regulatory polynucleotide or a junk DNA). Without wishing to be bound by theory, it is believed that the target sequence should be associated with a TAM (targeted adjacent motif); that is, a short sequence recognized by the complex. The precise sequence and length requirements for the TAMdiffer depending on the TnpB polypeptide used, but TAMs are typically 2-5 base pair sequences adjacent the protospacer (that is, the target sequence). TAM specificity can be determined, for example according to the experimental setyp described in FIG. 8. In one embodiment, the TAMsequence comprises TCA. In embodiments, the TAMsequence is TCAN, wherein N may comprise any nucleotide. In one embodiment the TAMsequence comprises TCAG or TCAT. A skilled person will be able to identify further TAMsequences for use with a given TnpB polypeptide. Further, engineering of the TAMInteracting (PI) domain may allow programing of TAMspecificity, improve target site recognition fidelity, and increase the versatility of the TnpB polypeptide, genome engineering platform. TnpB polypeptide may be engineered to alter their TAMspecificity, for example as described in Kleinstiver B P et al. Engineered CRISPR-Cas9 nucleases with altered TAMspecificities. Nature. 2015 Jul. 23; 523(7561):481-5. doi: 10.1038/nature14592.

[0429] Examples of target polynucleotides include a sequence associated with a signaling biochemical pathway, e.g., a signaling biochemical pathway-associated gene or polynucleotide. Examples of target polynucleotides include a disease associated gene or polynucleotide. A “disease-associated” gene or polynucleotide refers to any gene or polynucleotide which is yielding transcription or translation products at an abnormal level or in an abnormal form in cells derived from a disease-affected tissues compared with tissues or cells of a non-disease control. It may be a gene that becomes expressed at an abnormally high level; it may be a gene that becomes expressed at an abnormally low level, where the altered expression correlates with the occurrence and/or progression of the disease. A disease-associated gene also refers to a gene possessing mutation(s) or genetic variation that is directly responsible or is in linkage disequilibrium with a gene(s) that is responsible for the etiology of a disease. The transcribed or translated products may be known or unknown and may be at a normal or abnormal level.

[0430] Aspects of the invention relate to a method of targeting a polynucleotide, comprising contacting a sample that comprises the polynucleotide with a composition, system or TnpB polypeptide as described in any embodiment herein, a delivery system comprising a composition, system or TnpB polypeptide as described in any embodiment herein, a polynucleotide comprising a composition, system or TnpB polypeptide as described in any embodiment herein, a vector comprising a composition, system or TnpB polypeptide as described in any embodiment herein, or a vector system comprising a composition, system or TnpB polypeptide as described in any embodiment herein. In one embodiment, a target polynucleotide is contacted with at least two different composition, system or TnpB polypeptides. In further embodiments, the two different TnpB polypeptide have different target polynucleotide specificities, or degrees of specificity. In one embodiment, the two different TnpB polypeptide have a different TAMspecificity.

[0431] Also envisaged are methods of targeting a polynucleotide, comprising contacting a sample that comprises the polynucleotide with the composition and systems, vectors, polynucleotides, herein wherein contacting results in modification of a gene product or modification of the amount or expression of a gene product. In one embodiment, the expression of the targeted gene product is increased by the method. In one embodiment, the expression of the targeted gene product is increased by at least 10%, at least 15%, at least 20%, at least 25%, at least 30%, at least 35%, at least 40%, at least 45%, at least 50%, at least 55%, at least 60%, at least 65%, at least 70%, at least 75%, at least 80%, at least 85%, p at least 90%, at least 95%, 100%. In one embodiment, the expression of the targeted gene product is increased at least 1.5-fold, at least 2-fold, at least 2.5-fold, at least 3-fold, at least 3.5-fold, at least 3.5-fold, at least 4-fold, at least 4.5-fold, at least 5-fold, at least 10-fold, at least 10-fold, at least 15-fold, at least 20-fold, at least 25-fold, at least 50-fold, at least 100-fold. In one embodiment, the expression of the targeted gene product is reduced by at least 10%, by at least 15%, by at least 20%, by at least 25%, by at least 30%, by at least 35%, by at least 40%, by at least 45%, by at least 50%, by at least 55%, by at least 60%, by at least 65%, by at least 70%, by at least 75%, by at least 80%, by at least 85%, by at least 90%, by at least 95%, by at least 100%. In one embodiment, the expression of the targeted gene product is reduced at least 1.5-fold, at least 2-fold, at least 2.5-fold, at least 3-fold, at least 3.5-fold, at least 3.5-fold, at least 4-fold, at least 4.5-fold, at least 5-fold, at least 10-fold, at least 10-fold, at least 15-fold, at least 20-fold, at least 25-fold, at least 50-fold, at least 100-fold. In alternative embodiments, the expression of the targeted gene product is reduced by the method. In further embodiments, expression of the targeted gene may be completely eliminated, or may be considered eliminated as remnant expression levels of the targeted gene fall below the detection limit of methods known in the art that are used to quantify, detect, or monitor expression levels of genes.

[0432] In one embodiment, one or more polynucleotide molecules, vectors, or vector systems driving expression of one or more elements of a TnpB system or delivery systems comprising one or more elements of the TnpB system are introduced into a host cell such that expression of the elements of the TnpB system direct formation of a TnpB-targeting complex at one or more target sites. In one embodiment of the invention the host cell may be a eukaryotic cell, a prokaryotic cell, or a plant cell.

[0433] In particular embodiments, the host cell is a cell of a cell line. Cell lines are available from a variety of sources known to those with skill in the art (see, e.g., the American Type Culture Collection (ATCC) (Manassas, Va.)). In one embodiment, a cell transfected with one or more vectors described herein is used to establish a new cell line comprising one or more vector-derived sequences. In one embodiment, a cell transiently transfected with the components of a composition or system as described herein (such as by transient transfection of one or more vectors, or transfection with RNA), and modified through the activity of a complex, is used to establish a new cell line comprising cells containing the modification but lacking any other exogenous sequence. In one embodiment, cells transiently or non-transiently transfected with one or more vectors described herein, or cell lines derived from such cells are used in assessing one or more test compounds.

[0434] Further intended are isolated human cells or tissues, plants or non-human animals comprising one or more of the polynucleotide molecules, vectors, vector systems, or cells described in any of the embodiments herein. In an aspect, host cells and cell lines modified by or comprising the compositions, systems or modified enzymes of present invention are provided, including (isolated) stem cells, and progeny thereof.

[0435] In one embodiment, the plants or non-human animals comprise at least one of the compositions, polynucleotide molecules, vectors, vector systems, or cells described in any of the embodiments herein at least one tissue type of the plant or non-human animal. In certain embodiment, non-human animals comprise at least one of the compositions, polynucleotide molecules, vectors, vector systems, or cells described in any of the embodiments herein in at least one tissue type. In one embodiment, the presence of the compositions is transient, in that they are degraded over time. In one embodiment, expression of the compositions described in any of the embodiments comprised in polynucleotide molecules, vectors, vector systems, or cells is limited to certain tissue types or regions in the plant or non-human animal. In one embodiment, the expression of the compositions described in any of the embodiments comprised in polynucleotide molecules, vectors, vector systems, or cells is dependent of a physiological cue. In one embodiment, expression of the compositions described in any of the embodiments comprised in polynucleotide molecules, vectors, vector systems, or cells may be triggered by an exogenous molecule. In one embodiment, expression of the compositions described in any of the embodiments comprised in polynucleotide molecules, vectors, vector systems, or cells is dependent on the expression of a non-Cas molecule in the plant or non-human animal.

[0436] In one aspect, the invention provides methods for using one or more elements of a TnpB system. The TnpB-targeting complex of the invention provides an effective means for modifying a target DNA or RNA (single or double stranded, linear, or super-coiled). The TnpB-targeting complex of the invention has a wide variety of utility including modifying (e.g., deleting, inserting, translocating, inactivating, activating) a target DNA or RNA in a multiplicity of cell types. As such, the TnpB-targeting complex of the invention has a broad spectrum of applications in, e.g., gene therapy, drug screening, disease diagnosis, and prognosis. An exemplary TnpB-targeting complex comprises a DNA or RNA-targeting effector protein complexed with a nucleic acid component molecule hybridized to a target sequence within the target locus of interest.

[0437] In one embodiment, this invention provides a method of cleaving a target polynucleotide. The method may comprise modifying a target polynucleotide using a TnpB-targeting complex that binds to the target polynucleotide and effect cleavage of said target polynucleotide. In an embodiment, the TnpB-targeting complex of the invention, when introduced into a cell, may create a break (e.g., a single or a double strand break) in the polynucleotide sequence. For example, the method can be used to cleave a disease polynucleotide in a cell. For example, an exogenous template comprising a sequence to be integrated flanked by an upstream sequence and a downstream sequence may be introduced into a cell. The upstream and downstream sequences share sequence similarity with either side of the site of integration in the polynucleotide. The exogenous template comprises a sequence to be integrated (e.g., a mutated RNA). The sequence for integration may be a sequence endogenous or exogenous to the cell. Examples of a sequence to be integrated include polynucleotide encoding a protein or a non-coding RNA (e.g., a microRNA). Thus, the sequence for integration may be operably linked to an appropriate control sequence or sequences. Alternatively, the sequence to be integrated may provide a regulatory function. The upstream and downstream sequences in the recombination template are selected to promote recombination between the RNA sequence of interest and the recombination. The upstream sequence is a polynucleotide sequence that shares sequence similarity with the sequence upstream of the targeted site for integration. Similarly, the downstream sequence is a polynucleotide sequence that shares sequence similarity with the polynucleotide sequence downstream of the targeted site of integration. The upstream and downstream sequences in the recombination template can have 75%, 80%, 85%, 90%, 95%, or 100% sequence identity with the targeted sequence. Preferably, the upstream and downstream sequences in the recombination template have about 95%, 96%, 97%, 98%, 99%, or 100% sequence identity with the targeted sequence. In some methods, the upstream and downstream sequences in the recombination template have about 99% or 100% sequence identity with the targeted sequence. An upstream or downstream sequence may comprise from about 20 bp to about 2500 bp, for example, about 50, 100, 200, 300, 400, 500, 600, 700, 800, 900, 1000, 1100, 1200, 1300, 1400, 1500, 1600, 1700, 1800, 1900, 2000, 2100, 2200, 2300, 2400, or 2500 bp. In some methods, the exemplary upstream or downstream sequence have about 200 bp to about 2000 bp, about 600 bp to about 1000 bp, or more particularly about 700 bp to about 1000 bp. In some methods, the recombination template may further comprise a marker. Such a marker may make it easy to screen for targeted integrations. Examples of suitable markers include restriction sites, fluorescent proteins, or selectable markers. The recombination template of the invention can be constructed using recombinant techniques (see, for example, Sambrook et al., 2001 and Ausubel et al., 1996). In a method for modifying a target sequence by integrating a recombination template, a break (e.g., double or single stranded break in double or single stranded DNA or RNA) is introduced into the DNA or RNA sequence by the TnpB-targeting complex, the break is repaired via homologous recombination with an recombination template such that the template is integrated into the target. The presence of a double-stranded break facilitates integration of the template. In other embodiments, this invention provides a method of modifying expression of a RNA in a eukaryotic cell. The method comprises increasing or decreasing expression of a target polynucleotide by using a TnpB-targeting complex that binds to the DNA or RNA (e.g., mRNA or pre-mRNA). In some methods, a target can be inactivated to affect the modification of the expression in a cell. For example, upon the binding of a TnpB-targeting complex to a target sequence in a cell, the target is inactivated such that the sequence is not translated, the coded protein is not produced, or the sequence does not function as the wild-type sequence does. For example, a protein or microRNA coding sequence may be inactivated such that the protein or microRNA or pre-microRNA transcript is not produced. The target of a TnpB-targeting complex can be any polynucleotide endogenous or exogenous to the eukaryotic cell. For example, the target polynucleotide can be a polynucleotide residing in the nucleus of the eukaryotic cell. The target polynucleotide can be a sequence coding a gene product (e.g., a protein) or a non-coding sequence (e.g., ncRNA, lncRNA, tRNA, or rRNA). Examples of target RNA include a sequence associated with a signaling biochemical pathway, e.g., a signaling biochemical pathway-associated polynucleotide. Examples of target polynucleotide include a disease associated polynucleotide. A “disease-associated” polynucleotide refers to any polynucleotide which is yielding translation products at an abnormal level or in an abnormal form in cells derived from a disease-affected tissues compared with tissues or cells of a non-disease control. It may be a gene that becomes expressed at an abnormally high level; it may be a gene that becomes expressed at an abnormally low level, where the altered expression correlates with the occurrence and/or progression of the disease. A disease-associated polynucleotide also refers to a gene possessing mutation(s) or genetic variation that is directly responsible or is in linkage disequilibrium with a gene(s) that is responsible for the etiology of a disease. The translated products may be known or unknown and may be at a normal or abnormal level. The target RNA of a TnpB-targeting complex can be any polynucleotide endogenous or exogenous to the eukaryotic cell. For example, the target RNA can be an RNA residing in the nucleus of the eukaryotic cell. The target polynucleotide can be a sequence coding a gene product (e.g., a protein) or a non-coding sequence (e.g., ncRNA, lncRNA, tRNA, or IRNA).

[0438] In one embodiment, the method may comprise allowing a composition to bind to the target DNA or RNA to effect cleavage of said target DNA or RNA thereby modifying the target DNA or RNA, wherein the TnpB-targeting complex comprises a nucleic acid-targeting effector protein complexed with a nucleic acid component molecule hybridized to a target sequence within said target DNA or RNA. In one aspect, the invention provides a method of modifying expression of DNA or RNA in a eukaryotic cell. In one embodiment, the method comprises allowing a TnpB-targeting complex to bind to the DNA or RNA such that said binding results in increased or decreased expression of said DNA or RNA; wherein the TnpB-targeting complex comprises a nucleic acid-targeting effector protein complexed with a nucleic acid component molecule. Similar considerations and conditions apply as above for methods of modifying a target DNA or RNA. In fact, these sampling, culturing and re-introduction options apply across the aspects of the present invention. In one aspect, the invention provides for methods of modifying a target DNA or RNA in a eukaryotic cell, which may be in vivo, ex vivo or in vitro. In one embodiment, the method comprises sampling a cell or population of cells from a human or non-human animal and modifying the cell or cells. Culturing may occur at any stage ex vivo. The cell or cells may even be re-introduced into the non-human animal or plant. For re-introduced cells it is particularly preferred that the cells are stem cells. The compositions as described in any embodiment herein may be used to detect nucleic acid identifiers. Nucleic acid identifiers are non-coding nucleic acids that may be used to identify a particular article. Example nucleic acid identifiers, such as DNA watermarks, are described in Heider and Barnekow. “DNA watermarks: A proof of concept” BMC Molecular Biology 9:40 (2008). The nucleic acid identifiers may also be a nucleic acid barcode. A nucleic-acid based barcode is a short sequence of nucleotides (for example, DNA, RNA, or combinations thereof) that is used as an identifier for an associated molecule, such as a target molecule and/or target nucleic acid. A nucleic acid barcode can have a length of at least, for example, 4, 5, 6, 7, 8, 9, 10, 11, 12, 13, 14, 15, 16, 17, 18, 19, 20, 21, 22, 23, 24, 25, 26, 27, 28, 29, 30, 35, 40, 45, 50, 60, 70, 80, 90, or 100 nucleotides, and can be in single- or double-stranded form. One or more nucleic acid barcodes can be attached, or “tagged,” to a target molecule and/or target nucleic acid. This attachment can be direct (for example, covalent or non-covalent binding of the barcode to the target molecule) or indirect (for example, via an additional molecule, for example, a specific binding agent, such as an antibody (or other protein) or a barcode receiving adaptor (or other nucleic acid molecule). Target molecule and/or target nucleic acids can be labeled with multiple nucleic acid barcodes in combinatorial fashion, such as a nucleic acid barcode concatemer. Typically, a nucleic acid barcode is used to identify target molecules and/or target nucleic acids as being from a particular compartment (for example a discrete volume), having a particular physical property (for example, affinity, length, sequence, etc.), or having been subject to certain treatment conditions. Target molecule and/or target nucleic acid can be associated with multiple nucleic acid barcodes to provide information about all of these features (and more). Methods of generating nucleic acid-barcodes are disclosed, for example, in International Patent Application Publication No. WO/2014/047561.

[0439] In an embodiment, compositions induce a double strand break for the purpose of inducing HDR-mediated correction. In a further embodiment, two or more nucleic acid component molecules complexing with TnpB polypeptide or an ortholog or homolog thereof, may be used to induce multiplexed breaks for purpose of inducing HDR-mediated correction.

[0440] A recombination template nucleic acid, as that term is used herein, refers to a nucleic acid sequence which can be used in conjunction with compositions discloser herein to alter the structure of a target position. In an embodiment, the target nucleic acid is modified to have some or all of the sequence of the recombination template nucleic acid, typically at or near cleavage site(s). In an embodiment, the recombination template nucleic acid is single stranded. In an alternate embodiment, the recombination template nucleic acid is double stranded. In an embodiment, the recombination template nucleic acid is DNA, e.g., double stranded DNA. In an alternate embodiment, the recombination template nucleic acid is single stranded DNA.

[0441] In one embodiment, a recombination template is provided to serve as a template in homologous recombination, such as within or near a target sequence nicked or cleaved by a nucleic acid-targeting effector protein as a part of a TnpB-targeting complex.

[0442] A recombination template may be a component of another vector as described herein, contained in a separate vector, or provided as a separate polynucleotide. A recombination template polynucleotide may be of any suitable length, such as about or more than about 10, 15, 20, 25, 50, 75, 100, 150, 200, 500, 1000, or more nucleotides in length. In one embodiment, the recombination template polynucleotide is complementary to a portion of a polynucleotide comprising the target sequence. When optimally aligned, a recombination template polynucleotide might overlap with one or more nucleotides of a target sequences (e.g., about or more than about 1, 5, 10, 15, 20, 25, 30, 35, 40, 45, 50, 60, 70, 80, 90, 100 or more nucleotides). In one embodiment, when a recombination template sequence and a polynucleotide comprising a target sequence are optimally aligned, the nearest nucleotide of the recombination template polynucleotide is within about 1, 5, 10, 15, 20, 25, 50, 75, 100, 200, 300, 400, 500, 1000, 5000, 10000, or more nucleotides from the target sequence.

[0443] In an embodiment, the recombination template nucleic acid alters the structure of the target position by participating in homologous recombination. In an embodiment, the recombination template nucleic acid alters the sequence of the target position. In an embodiment, the recombination template nucleic acid results in the incorporation of a modified, or non-naturally occurring base into the target nucleic acid.

[0444] The recombination template sequence may undergo a breakage mediated or catalyzed recombination with the target sequence. In an embodiment, the recombination template nucleic acid may include sequence that corresponds to a site on the target sequence that is cleaved by an TnpB polypeptide mediated cleavage event. In an embodiment, the recombination template nucleic acid may include sequence that corresponds to both, a first site on the target sequence that is cleaved in a first TnpB polypeptide mediated event and a second site on the target sequence that is cleaved in a second TnpB polypeptide mediated event.

[0445] In one embodiment, the recombination template nucleic acid can include sequence which results in an alteration in the coding sequence of a translated sequence, e.g., one which results in the substitution of one amino acid for another in a protein product, e.g., transforming a mutant allele into a wild type allele, transforming a wild type allele into a mutant allele, and/or introducing a stop codon, insertion of an amino acid residue, deletion of an amino acid residue, or a nonsense mutation. In one embodiment, the recombination template nucleic acid can include sequence which results in an alteration in a non-coding sequence, e.g., an alteration in an exon or in a 5′ or 3′ non-translated or non-transcribed region. Such alterations include an alteration in a control element, e.g., a promoter, enhancer, and an alteration in a cis-acting or trans-acting control element.

[0446] A recombination template nucleic acid having homology with a target position in a target gene may be used to alter the structure of a target sequence. The recombination template sequence may be used to alter an unwanted structure, e.g., an unwanted or mutant nucleotide. The recombination template nucleic acid may include sequence which, when integrated, results in: decreasing the activity of a positive control element; increasing the activity of a positive control element; decreasing the activity of a negative control element; increasing the activity of a negative control element; decreasing the expression of a gene; increasing the expression of a gene; increasing resistance to a disorder or disease; increasing resistance to viral entry; correcting a mutation or altering an unwanted amino acid residue conferring, increasing, abolishing or decreasing a biological property of a gene product, e.g., increasing the enzymatic activity of an enzyme, or increasing the ability of a gene product to interact with another molecule.

[0447] The recombination template nucleic acid may include sequence which results in: a change in sequence of 1, 2, 3, 4, 5, 6, 7, 8, 9, 10, 1 1, 12 or more nucleotides of the target sequence. In an embodiment, the recombination template nucleic acid may be 20+/−10, 30+/−10, 40+/−10, 50+/−10, 60+/−10, 70+/−10, 80+/−10, 90+/−10, 100+/−10, 1 10+/−10, 120+/−10, 130+/−10, 140+/−10, 150+/−10, 160+/−10, 170+/−10, 1 80+/−10, 190+/−10, 200+/−10, 210+/−10, of 220+/−10 nucleotides in length. In an embodiment, the t recombination template nucleic acid may be 30+/−20, 40+/−20, 50+/−20, 60+/−20, 70+/−20, 80+/−20, 90+/−20, 100+/−20, 1 10+/−20, 120+/−20, 130+/−20, 140+/−20, I 50+/−20, 160+/−20, 170+/−20, 180+/−20, 190+/−20, 200+/−20, 210+/−20, of 220+/−20 nucleotides in length. In an embodiment, the recombination template nucleic acid is 10 to 1,000, 20 to 900, 30 to 800, 40 to 700, 50 to 600, 50 to 500, 50 to 400, 50 to 300, 50 to 200, or 50 to 100 nucleotides in length.

[0448] A recombination template nucleic acid comprises the following components: [5′ homology arm]-[replacement sequence]-[3′ homology arm]. The homology arms provide for recombination into the chromosome, thus replacing the undesired element, e.g., a mutation or signature, with the replacement sequence. In an embodiment, the homology arms flank the most distal cleavage sites. In an embodiment, the 3′ end of the 5′ homology arm is the position next to the 5′ end of the replacement sequence. In an embodiment, the 5′ homology arm can extend at least 10, 20, 30, 40, 50, 100, 200, 300, 400, 500, 600, 700, 800, 900, 1000, 1500, or 2000 nucleotides 5′ from the 5′ end of the replacement sequence. In an embodiment, the 5′ end of the 3′ homology arm is the position next to the 3′ end of the replacement sequence. In an embodiment, the 3′ homology arm can extend at least 10, 20, 30, 40, 50, 100, 200, 300, 400, 500, 600, 700, 800, 900, 1000, 1500, or 2000 nucleotides 3′ from the 3′ end of the replacement sequence.

[0449] In one embodiment, one or both homology arms may be shortened to avoid including certain sequence repeat elements. For example, a 5′ homology arm may be shortened to avoid a sequence repeat element. In other embodiments, a 3′ homology arm may be shortened to avoid a sequence repeat element. In one embodiment, both the 5′ and the 3′ homology arms may be shortened to avoid including certain sequence repeat elements.

[0450] In one embodiment, a recombination template nucleic acids for correcting a mutation may designed for use as a single-stranded oligonucleotide. When using a single-stranded oligonucleotide, 5′ and 3′ homology arms may range up to about 200 base pairs (bp) in length, e.g., at least 25, 50, 75, 100, 125, 150, 175, or 200 bp in length.

[0451] Unlike TnpB polypeptide-mediated gene knockout, which permanently eliminates expression by mutating the gene at the DNA level, TnpB polypeptide knockdown allows for temporary reduction of gene expression through the use of artificial transcription factors. Mutating key residues in both DNA cleavage domains of the TnpB polypeptide, results in the generation of a catalytically inactive TnpB polypeptide. A catalytically inactive TnpB polypeptide complexes with a nucleic acid component molecule and localizes to the DNA sequence specified by that nucleic acid component molecule's targeting domain, however, it does not cleave the target DNA. Fusion of the inactive TnpB polypeptide protein to an effector domain, e.g., a transcription repression domain, enables recruitment of the effector to any DNA site specified by the nucleic acid component molecule. In one embodiment, TnpB polypeptide may be fused to a transcriptional repression domain and recruited to the promoter region of a gene. Especially for gene repression, it is contemplated herein that blocking the binding site of an endogenous transcription factor would aid in downregulating gene expression. In another embodiment, an inactive TnpB polypeptide can be fused to a chromatin modifying protein. Altering chromatin status can result in decreased expression of the target gene.

[0452] In an embodiment, a nucleic acid component molecule can be targeted to a known transcription response elements (e.g., promoters, enhancers, etc.), a known upstream activating sequence, and/or sequences of unknown or known function that are suspected of being able to control expression of the target DNA.

[0453] In some methods, a target polynucleotide can be inactivated to affect the modification of the expression in a cell. For example, upon the binding of a composition to a target sequence in a cell, the target polynucleotide is inactivated such that the sequence is not transcribed, the coded protein is not produced, or the sequence does not function as the wild-type sequence does. For example, a protein or microRNA coding sequence may be inactivated such that the protein is not produced.

### Non-Homologous End-Joining

[0454] In one embodiment, nuclease-induced non-homologous end-joining (NHEJ) can be used to target gene-specific knockouts. Nuclease-induced NHEJ can also be used to remove (e.g., delete) sequence in a gene of interest. Generally, NHEJ repairs a double-strand break in the DNA by joining together the two ends; however, generally, the original sequence is restored only if two compatible ends, exactly as they were formed by the double-strand break, are perfectly ligated. The DNA ends of the double-strand break are frequently the subject of enzymatic processing, resulting in the addition or removal of nucleotides, at one or both strands, prior to rejoining of the ends. This results in the presence of insertion and/or deletion (indel) mutations in the DNA sequence at the site of the NHEJ repair. Two-thirds of these mutations typically alter the reading frame and, therefore, produce a non-functional protein. Additionally, mutations that maintain the reading frame, but which insert or delete a significant amount of sequence, can destroy functionality of the protein. This is locus dependent as mutations in critical functional domains are likely less tolerable than mutations in non-critical regions of the protein. The indel mutations generated by NHEJ are unpredictable in nature; however, at a given break site certain indel sequences are favored and are over represented in the population, likely due to small regions of microhomology. The lengths of deletions can vary widely; most commonly in the 1-50 bp range, but they can easily be greater than 50 bp, e.g., they can easily reach greater than about 100-200 bp. Insertions tend to be shorter and often include short duplications of the sequence immediately surrounding the break site. However, it is possible to obtain large insertions, and in these cases, the inserted sequence has often been traced to other regions of the genome or to plasmid DNA present in the cells.

[0455] Because NHEJ is a mutagenic process, it may also be used to delete small sequence motifs as long as the generation of a specific final sequence is not required. If a double-strand break is targeted near to a short target sequence, the deletion mutations caused by the NHEJ repair often span, and therefore remove, the unwanted nucleotides. For the deletion of larger DNA segments, introducing two double-strand breaks, one on each side of the sequence, can result in NHEJ between the ends with removal of the entire intervening sequence. Both of these approaches can be used to delete specific DNA sequences; however, the error-prone nature of NHEJ may still produce indel mutations at the site of repair.

[0456] Both double strand cleaving TnpB polypeptide, or an ortholog or homolog thereof, and single strand, or nickase, TnpB polypeptide, or an ortholog or homolog thereof, molecules can be used in the methods and compositions described herein to generate NHEJ-mediated indels. NHEJ-mediated indels targeted to the gene, e.g., a coding region, e.g., an early coding region of a gene of interest can be used to knockout (i.e., eliminate expression of) a gene of interest. For example, early coding region of a gene of interest includes sequence immediately following a transcription start site, within a first exon of the coding sequence, or within 500 bp of the transcription start site (e.g., less than 500, 450, 400, 350, 300, 250, 200, 150, 100 or 50 bp).

[0457] In an embodiment, in which a nucleic acid component molecule and TnpB polypeptide, or an ortholog or homolog thereof, generate a double strand break for the purpose of inducing NHEJ-mediated indels, an RNA component molecule may be configured to position one double-strand break in close proximity to a nucleotide of the target position. In an embodiment, the cleavage site may be between 0-500 bp away from the target position (e.g., less than 500, 400, 300, 200, 100, 50, 40, 30, 25, 20, 15, 10, 9, 8, 7, 6, 5, 4, 3, 2 or 1 bp from the target position).

[0458] In an embodiment, in which two nucleic acid component molecules complexing with TnpB polypeptide, or an ortholog or homolog thereof, e.g., TnpB polypeptide nickases induce two single strand breaks for the purpose of inducing NHEJ-mediated indels, two nucleic acid component molecules may be configured to position two single-strand breaks to provide for NHEJ repair a nucleotide of the target position.

[0459] In some examples, the systems herein may introduce one or more indels via NHEJ pathway and insert sequence from a combination template via HDR.

### Exemplary Applications

[0460] The invention provides a non-naturally occurring or engineered composition, or one or more polynucleotides encoding components of said composition, or vector or delivery systems comprising one or more polynucleotides encoding components of said composition for use in a modifying a target cell in vivo, ex vivo or in vitro and, may be conducted in a manner alters the cell such that once modified the progeny or cell line of the TnpB polypeptide modified cell retains the altered phenotype. The modified cells and progeny may be part of a multi-cellular organism such as a plant or animal with ex vivo or in vivo application of composition to desired cell types. The methods herein include a therapeutic method of treatment. The therapeutic method of treatment may comprise gene or genome editing, or gene therapy.

[0461] In one embodiment, one or more vectors described herein are used to produce a non-human transgenic animal or transgenic plant. In one embodiment, the transgenic animal is a mammal, such as a mouse, rat, or rabbit. Methods for producing transgenic animals and plants are known in the art, and generally begin with a method of cell transfection, such as described herein.

### Use of Orthogonal Catalytically Inactive TnpB Polypeptides

[0462] In particular embodiments, the TnpB polypeptide nickase is used in combination with an orthogonal catalytically inactive TnpB polypeptide to increase efficiency of said nickase (e.g., as described in Chen et al. 2017, Nature Communications 8:14958; doi: 10.1038/ncomms14958). More particularly, the orthogonal catalytically inactive TnpB polypeptide is characterized by a different TAMrecognition site than the TnpB nickase used in the AD-functionalized composition and the corresponding nucleic acid component molecule sequence is selected to bind to a target sequence proximal to that of the nickase of the functionalized TnpB polypeptide. The orthogonal catalytically inactive TnpB polypeptide as used in the context of the present invention does not form part of the functionalized composition but merely functions to increase the efficiency of said nickase and is used in combination with a standard nucleic acid component as described in the art for said TnpB polypeptide. In particular embodiments, said orthogonal catalytically inactive TnpB polypeptide is a dead TnpB polypeptide, i.e., comprising one or more mutations which abolishes the nuclease activity of said TnpB polypeptide. In particular embodiments, the catalytically inactive orthogonal TnpB polypeptide is provided with two or more nucleic acid components which are capable of hybridizing to target sequences which are proximal to the target sequence of the nickase. In particular embodiments, at least two nucleic acid components are used to target said catalytically inactive TnpB polypeptide, of which at least one nucleic acid component is capable of hybridizing to a target sequence 5″ of the target sequence of the nickase and at least one nucleic acid component is capable of hybridizing to a target sequence 3′ of the target sequence of the nickase of the functionalized composition, whereby said one or more target sequences may be on the same or the opposite DNA strand as the target sequence of the TnpB nickase. In particular embodiments, the guide sequences of the one or more @nucleic acid components of the orthogonal catalytically inactive TnpB polypeptide are selected such that the target sequences are proximal to that of the nucleic acid component for the targeting of the functionalized composition, e.g., for the targeting of the nickase. In particular embodiments, the one or more target sequences of the orthogonal catalytically inactive TnpB polypeptide are each separated from the target sequence of the nickase by more than 5 but less than 450 basepairs. Optimal distances between the target sequences of the nucleic acid component molecules for use with the orthogonal catalytically inactive TnpB polypeptide and the target sequence of the functionalized composition can be determined by the skilled person. In particular embodiments, the catalytically inactive orthogonal TnpB polypeptide has been modified to alter its TAMspecificity as described elsewhere herein. In particular embodiments, the TnpB polypeptide nickase is a nickase which, by itself has limited activity in human cells, but which, in combination with an inactive orthogonal TnpB polypeptide and one or more corresponding proximal nucleic acid component molecules ensures the required nickase activity.

### Detection Methods Such as FISH

[0463] In one aspect, the invention provides an engineered, non-naturally occurring composition comprising a catalytically inactivate TnpB polypeptide described herein and use this system in detection methods such as fluorescence in situ hybridization (FISH). A dead TnpB polypeptide which lacks the ability to produce DNA double-strand breaks may be fused with a marker, such as fluorescent protein, such as the enhanced green fluorescent protein (eEGFP) and co-expressed with small nucleic acid component molecules to target pericentric, centric and teleomeric repeats in vivo. The dead TnpB polypeptide system can be used to visualize both repetitive sequences and individual genes in the human genome. Such new applications of labelled dead TnpB polypeptide may be important in imaging cells and studying the functional nuclear architecture, especially in cases with a small nucleus volume or complex 3-D structures. (Chen B, Gilbert L A, Cimini B A, Schnitzbauer J, Zhang W, Li G W, Park J, Blackburn E H, Weissman J S, Qi L S, Huang B. 2013. Dynamic imaging of genomic loci in living human cells by an optimized CRISPR/Cas system. Cell 155(7):1479-91. doi: 10.1016/j.cell.2013.12.001.)

### Patient-Specific Screening Methods

[0464] A nucleic acid-targeting system that targets DNA, e.g., trinucleotide repeats can be used to screen patients or patent samples for the presence of such repeats. The repeats can be the target of the ωRNA of the TnpB system, and if there is binding thereto by the TnpB system, that binding can be detected, to thereby indicate that such a repeat is present. Thus, a TnpB system can be used to screen patients or patient samples for the presence of the repeat. The patient can then be administered suitable compound(s) to address the condition; or can be administered a TnpB system to bind to and cause insertion, deletion or mutation and alleviate the condition.

### Models of Genetic and Epigenetic Conditions

[0465] A method of the invention may be used to create a plant, an animal or cell that may be used to model and/or study genetic or epigenetic conditions of interest, such as a through a model of mutations of interest or a disease model. As used herein, “disease” refers to a disease, disorder, or indication in a subject. For example, a method of the invention may be used to create an animal or cell that comprises a modification in one or more nucleic acid sequences associated with a disease, or a plant, animal, or cell in which the expression of one or more nucleic acid sequences associated with a disease are altered. Such a nucleic acid sequence may encode a disease associated protein sequence or may be a disease associated control sequence. Accordingly, it is understood that in embodiments of the invention, a plant, subject, patient, organism, or cell can be a non-human subject, patient, organism, or cell. Thus, the invention provides a plant, animal, or cell, produced by the present methods, or a progeny thereof. The progeny may be a clone of the produced plant or animal or may result from sexual reproduction by crossing with other individuals of the same species to introgress further desirable traits into their offspring. The cell may be in vivo or ex vivo in the cases of multicellular organisms, particularly animals or plants. In the instance where the cell is in cultured, a cell line may be established if appropriate culturing conditions are met and preferably if the cell is suitably adapted for this purpose (for instance a stem cell). Bacterial cell lines produced by the invention are also envisaged. Hence, cell lines are also envisaged.

[0466] In some methods, the disease model can be used to study the effects of mutations on the animal or cell and development and/or progression of the disease using measures commonly used in the study of the disease. Alternatively, such a disease model is useful for studying the effect of a pharmaceutically active compound on the disease.

[0467] In some methods, the disease model can be used to assess the efficacy of a potential gene therapy strategy. That is, a disease-associated gene or polynucleotide can be modified such that the disease development and/or progression is inhibited or reduced. In particular, the method comprises modifying a disease-associated gene or polynucleotide such that an altered protein is produced and, as a result, the animal or cell has an altered response. Accordingly, in some methods, a genetically modified animal may be compared with an animal predisposed to development of the disease such that the effect of the gene therapy event may be assessed.

[0468] In another embodiment, this invention provides a method of developing a biologically active agent that modulates a cell signaling event associated with a disease gene. The method comprises contacting a test compound with a cell comprising one or more vectors that drive expression of one or more of a TnpB polypeptide, and a conserved nucleotide sequence linked to a guide/spacer sequence; and detecting a change in a readout that is indicative of a reduction or an augmentation of a cell signaling event associated with, e.g., a mutation in a disease gene contained in the cell.

[0469] A cell model or animal model can be constructed in combination with the method of the invention for screening a cellular function change. Such a model may be used to study the effects of a genome sequence modified by the complex of the invention on a cellular function of interest. For example, a cellular function model may be used to study the effect of a modified genome sequence on intracellular signaling or extracellular signaling. Alternatively, a cellular function model may be used to study the effects of a modified genome sequence on sensory perception. In some such models, one or more genome sequences associated with a signaling biochemical pathway in the model are modified.

[0470] Several disease models have been specifically investigated. These include de novo autism risk genes CHD8, KATNAL2, and SCN2A; and the syndromic autism (Angelman Syndrome) gene UBE3A. These genes and resulting autism models are of course preferred but serve to show the broad applicability of the invention across genes and corresponding models. An altered expression of one or more genome sequences associated with a signaling biochemical pathway can be determined by assaying for a difference in the mRNA levels of the corresponding genes between the test model cell and a control cell, when they are contacted with a candidate agent. Alternatively, the differential expression of the sequences associated with a signaling biochemical pathway is determined by detecting a difference in the level of the encoded polypeptide or gene product.

[0471] To assay for an agent-induced alteration in the level of mRNA transcripts or corresponding polynucleotides, nucleic acid contained in a sample is first extracted according to standard methods in the art. For instance, mRNA can be isolated using various lytic enzymes or chemical solutions according to the procedures set forth in Sambrook et al. (1989) or extracted by nucleic-acid-binding resins following the accompanying instructions provided by the manufacturers. The mRNA contained in the extracted nucleic acid sample is then detected by amplification procedures or conventional hybridization assays (e.g., Northern blot analysis) according to methods widely known in the art or based on the methods exemplified herein.

[0472] For purpose of this invention, amplification means any method employing a primer and a polymerase capable of replicating a target sequence with reasonable fidelity. Amplification may be carried out by natural or recombinant DNA polymerases such as TaqGold™, T7 DNA polymerase, Klenow fragment of E. coli DNA polymerase, and reverse transcriptase. A preferred amplification method is PCR. In particular, the isolated RNA can be subjected to a reverse transcription assay that is coupled with a quantitative polymerase chain reaction (RT-PCR) in order to quantify the expression level of a sequence associated with a signaling biochemical pathway.

[0473] Detection of the gene expression level can be conducted in real time in an amplification assay. In one aspect, the amplified products can be directly visualized with fluorescent DNA-binding agents including but not limited to DNA intercalators and DNA groove binders. Because the amount of the intercalators incorporated into the double-stranded DNA molecules is typically proportional to the amount of the amplified DNA products, one can conveniently determine the amount of the amplified products by quantifying the fluorescence of the intercalated dye using conventional optical systems in the art. DNA-binding dye suitable for this application include SYBR green, SYBR blue, DAPI, propidium iodine, Hoeste, SYBR gold, ethidium bromide, acridines, proflavine, acridine orange, acriflavine, fluorcoumanin, ellipticine, daunomycin, chloroquine, distamycin D, chromomycin, homidium, mithramycin, ruthenium polypyridyls, anthramycin, and the like.

[0474] In another aspect, other fluorescent labels such as sequence specific probes can be employed in the amplification reaction to facilitate the detection and quantification of the amplified products. Probe-based quantitative amplification relies on the sequence-specific detection of a desired amplified product. It utilizes fluorescent, target-specific probes (e.g., TaqMan® probes) resulting in increased specificity and sensitivity. Methods for performing probe-based quantitative amplification are well established in the art and are taught in U.S. Pat. No. 5,210,015.

[0475] In yet another aspect, conventional hybridization assays using hybridization probes that share sequence homology with sequences associated with a signaling biochemical pathway can be performed. Typically, probes are allowed to form stable complexes with the sequences associated with a signaling biochemical pathway contained within the biological sample derived from the test subject in a hybridization reaction. It will be appreciated by one of skill in the art that where antisense is used as the probe nucleic acid, the target polynucleotides provided in the sample are chosen to be complementary to sequences of the antisense nucleic acids. Conversely, where the nucleotide probe is a sense nucleic acid, the target polynucleotide is selected to be complementary to sequences of the sense nucleic acid.

[0476] Hybridization can be performed under conditions of various stringency. Suitable hybridization conditions for the practice of the present invention are such that the recognition interaction between the probe and sequences associated with a signaling biochemical pathway is both sufficiently specific and sufficiently stable. Conditions that increase the stringency of a hybridization reaction are widely known and published in the art. See, for example, (Sambrook, et al., (1989); Nonradioactive In Situ Hybridization Application Manual, Boehringer Mannheim, second edition). The hybridization assay can be formed using probes immobilized on any solid support, including but are not limited to nitrocellulose, glass, silicon, and a variety of gene arrays. A preferred hybridization assay is conducted on high-density gene chips as described in U.S. Pat. No. 5,445,934.

[0477] For a convenient detection of the probe-target complexes formed during the hybridization assay, the nucleotide probes are conjugated to a detectable label. Detectable labels suitable for use in the present invention include any composition detectable by photochemical, biochemical, spectroscopic, immunochemical, electrical, optical, or chemical means. A wide variety of appropriate detectable labels are known in the art, which include fluorescent or chemiluminescent labels, radioactive isotope labels, enzymatic or other ligands. In preferred embodiments, one will likely desire to employ a fluorescent label or an enzyme tag, such as digoxigenin, β-galactosidase, urease, alkaline phosphatase or peroxidase, avidin/biotin complex.

[0478] The detection methods used to detect or quantify the hybridization intensity will typically depend upon the label selected above. For example, radiolabels may be detected using photographic film or a phosphoimager. Fluorescent markers may be detected and quantified using a photodetector to detect emitted light. Enzymatic labels are typically detected by providing the enzyme with a substrate and measuring the reaction product produced by the action of the enzyme on the substrate; and finally colorimetric labels are detected by simply visualizing the colored label.

[0479] An agent-induced change in expression of sequences associated with a signaling biochemical pathway can also be determined by examining the corresponding gene products. Determining the protein level typically involves a) contacting the protein contained in a biological sample with an agent that specifically bind to a protein associated with a signaling biochemical pathway; and (b) identifying any agent: protein complex so formed. In one aspect of this embodiment, the agent that specifically binds a protein associated with a signaling biochemical pathway is an antibody, preferably a monoclonal antibody.

[0480] The reaction is performed by contacting the agent with a sample of the proteins associated with a signaling biochemical pathway derived from the test samples under conditions that will allow a complex to form between the agent and the proteins associated with a signaling biochemical pathway. The formation of the complex can be detected directly or indirectly according to standard procedures in the art. In the direct detection method, the agents are supplied with a detectable label and unreacted agents may be removed from the complex; the amount of remaining label thereby indicating the amount of complex formed. For such method, it is preferable to select labels that remain attached to the agents even during stringent washing conditions. It is preferable that the label does not interfere with the binding reaction. In the alternative, an indirect detection procedure may use an agent that contains a label introduced either chemically or enzymatically. A desirable label generally does not interfere with binding or the stability of the resulting agent: polypeptide complex. However, the label is typically designed to be accessible to an antibody for an effective binding and, hence, generating a detectable signal.

[0481] A wide variety of labels suitable for detecting protein levels are known in the art. Non-limiting examples include radioisotopes, enzymes, colloidal metals, fluorescent compounds, bioluminescent compounds, and chemiluminescent compounds.

[0482] The amount of agent: polypeptide complexes formed during the binding reaction can be quantified by standard quantitative assays. As illustrated above, the formation of agent: polypeptide complex can be measured directly by the amount of label remained at the site of binding. In an alternative, the protein associated with a signaling biochemical pathway is tested for its ability to compete with a labeled analog for binding sites on the specific agent. In this competitive assay, the amount of label captured is inversely proportional to the amount of protein sequences associated with a signaling biochemical pathway present in a test sample.

[0483] A number of techniques for protein analysis based on the general principles outlined above are available in the art. They include, but are not limited to, radioimmunoassay, ELISA (enzyme linked immunoradiometric assays), “sandwich” immunoassays, immunoradiometric assays, in situ immunoassays (using e.g., colloidal gold, enzyme or radioisotope labels), western blot analysis, immunoprecipitation assays, immunofluorescent assays, and SDS-PAGE.

[0484] Antibodies that specifically recognize or bind to proteins associated with a signaling biochemical pathway are preferable for conducting the aforementioned protein analyses. Where desired, antibodies that recognize a specific type of post-translational modifications (e.g., signaling biochemical pathway inducible modifications) can be used. Post-translational modifications include but are not limited to glycosylation, lipidation, acetylation, and phosphorylation. These antibodies may be purchased from commercial vendors. For example, anti-phosphotyrosine antibodies that specifically recognize tyrosine-phosphorylated proteins are available from a number of vendors including Invitrogen and Perkin Elmer. Anti-phosphotyrosine antibodies are particularly useful in detecting proteins that are differentially phosphorylated on their tyrosine residues in response to an ER stress. Such proteins include, but are not limited to, eukaryotic translation initiation factor 2 alpha (eIF-2α). Alternatively, these antibodies can be generated using conventional polyclonal or monoclonal antibody technologies by immunizing a host animal or an antibody-producing cell with a target protein that exhibits the desired post-translational modification.

### Genome Wide Knock-Out Screening

[0485] The TnpB polypeptide and systems described herein can be used to perform efficient and cost effective functional genomic screens. Such screens can utilize TnpB polypeptide-based genome wide libraries. Such screens and libraries can provide for determining the function of genes, cellular pathways genes are involved in, and how any alteration in gene expression can result in a particular biological process. An advantage of the present invention is that the composition avoids off-target binding and its resulting side effects. This is achieved using systems arranged to have a high degree of sequence specificity for the target DNA. In preferred embodiments of the invention, the TnpB polypeptide complexes are TnpB polypeptide complexes.

[0486] In embodiments of the invention, a genome wide library may comprise a plurality of TnpB polypeptide nucleic acid component molecules, as described herein, comprising guide/spacer sequences that are capable of targeting a plurality of target sequences in a plurality of genomic loci in a population of eukaryotic cells. The population of cells may be a population of embryonic stem (ES) cells. The target sequence in the genomic locus may be a non-coding sequence. The non-coding sequence may be an intron, regulatory sequence, splice site, 3′ UTR, 5′ UTR, or polyadenylation signal. Gene function of one or more gene products may be altered by said targeting. The targeting may result in a knockout of gene function. The targeting of a gene product may comprise more than one nucleic acid component molecule. A gene product may be targeted by 2, 3, 4, 5, 6, 7, 8, 9, or 10 nucleic acid component molecules, preferably 3 to 4 per gene. Off-target modifications may be minimized by exploiting the staggered double strand breaks generated by TnpB polypeptide complexes or by utilizing methods analogous to those used in composition (See, e.g., DNA targeting specificity of RNA-guided Cas nucleases. Hsu, P., Scott, D., Weinstein, J., Ran, F A., Konermann, S., Agarwala, V., Li, Y., Fine, E., Wu, X., Shalem, O., Cradick, T J., Marraffini, L A., Bao, G., & Zhang, F. Nat Biotechnol doi:10.1038/nbt.2647 (2013)), incorporated herein by reference. The targeting may be of about 100 or more sequences. The targeting may be of about 1000 or more sequences. The targeting may be of about 20,000 or more sequences. The targeting may be of the entire genome. The targeting may be of a panel of target sequences focused on a relevant or desirable pathway. The pathway may be an immune pathway. The pathway may be a cell division pathway.

[0487] One aspect of the invention comprehends a genome wide library that may comprise a plurality of nucleic acid component molecules that may comprise guide/spacer sequences that are capable of targeting a plurality of target sequences in a plurality of genomic loci, wherein said targeting results in a knockout of gene function. This library may potentially comprise nucleic acid component molecules that target each and every gene in the genome of an organism.

[0488] In one embodiment of the invention, the organism or subject is a eukaryote (including mammal including human) or a non-human eukaryote or a non-human animal or a non-human mammal. In one embodiment, the organism or subject is a non-human animal, and may be an arthropod, for example, an insect, or may be a nematode. In some methods of the invention the organism or subject is a plant. In some methods of the invention, the organism or subject is a mammal or a non-human mammal. A non-human mammal may be for example a rodent (preferably a mouse or a rat), an ungulate, or a primate. In some methods of the invention the organism or subject is algae, including microalgae, or is a fungus.

[0489] The knockout of gene function may comprise introducing into each cell in the population of cells a vector system of one or more vectors comprising an engineered, non-naturally occurring composition herein. The nucleic acid component molecule sequence may target a unique gene in each cell, wherein the TnpB polypeptide is operably linked to a regulatory element, wherein when transcribed, the nucleic acid component molecule comprising the spacer sequence directs sequence-specific binding of the TnpB polypeptide to a target sequence in the genomic loci of the unique gene, inducing cleavage of the genomic loci by the TnpB polypeptide, and confirming different knockout mutations in a plurality of unique genes in each cell of the population of cells thereby generating a gene knockout cell library. The invention comprehends that the population of cells is a population of eukaryotic cells, and in a preferred embodiment, the population of cells is a population of embryonic stem (ES) cells.

[0490] The one or more vectors may be plasmid vectors. The vector may be a single vector comprising a TnpB polypeptide, a nucleic acid component, and optionally, a selection marker into target cells. Not being bound by a theory, the ability to simultaneously deliver a TnpB polypeptide and nucleic acid component through a single vector enables application to any cell type of interest, without the need to first generate cell lines that express the TnpB polypeptide. The regulatory element may be an inducible promoter. The inducible promoter may be a doxycycline inducible promoter. In some methods of the invention the expression of the nucleic acid component molecule sequence is under the control of the T7 promoter and is driven by the expression of T7 polymerase.

[0491] The confirming of different knockout mutations may be by whole exome sequencing. The knockout mutation may be achieved in 100 or more unique genes. The knockout mutation may be achieved in 1000 or more unique genes. The knockout mutation may be achieved in 20,000 or more unique genes. The knockout mutation may be achieved in the entire genome. The knockout of gene function may be achieved in a plurality of unique genes which function in a particular physiological pathway or condition. The pathway or condition may be an immune pathway or condition. The pathway or condition may be a cell division pathway or condition.

### Functional Alteration and Screening

[0492] In another aspect, the present invention provides for a method of functional evaluation and screening of genes. The use of the compositions to precisely deliver functional domains, to activate or repress genes or to alter epigenetic state by precisely altering the methylation site on a specific locus of interest, can be with one or more nucleic acid component molecules applied to a single cell or population of cells or with a library applied to genome in a pool of cells ex vivo or in vivo comprising the administration or expression of a library comprising a plurality of nucleic acid components (comprising spacer molecules) and wherein the screening further comprises use of a TnpB polypeptide, wherein the complex comprising the TnpB polypeptide is modified to comprise a heterologous functional domain. In an aspect the invention provides a method for screening a genome comprising the administration to a host or expression in a host in vivo of a library. In an aspect the invention provides a method as herein discussed further comprising an activator administered to the host or expressed in the host. In an aspect the invention provides a method as herein discussed wherein the activator is attached to a TnpB polypeptide. In an aspect the invention provides a method as herein discussed wherein the activator is attached to the N terminus or the C terminus of the TnpB polypeptide. In an aspect the invention provides a method as herein discussed wherein the activator is attached to a nucleic acid component loop. In an aspect the invention provides a method as herein discussed further comprising a repressor administered to the host or expressed in the host. In an aspect the invention provides a method as herein discussed, wherein the screening comprises affecting and detecting gene activation, gene inhibition, or cleavage in the locus.

[0493] It is also preferred to target endogenous (regulatory) control elements (such as enhancers and silencers) e.g., in addition to a promoter or promoter-proximal elements. Thus, the invention can also be used to target endogenous control elements (including enhancers and silencers) in addition to targeting of the promoter. These control elements can be located upstream and downstream of the transcriptional start site (TSS), starting from 200 bp from the TSS to 100 kb away. Targeting of known control elements can be used to activate or repress the gene of interest. In some cases, a single control element can influence the transcription of multiple target genes. Targeting of a single control element could therefore be used to control the transcription of multiple genes simultaneously.

[0494] Targeting of putative control elements on the other hand (e.g., by tiling the region of the putative control element as well as 200 bp up to 100 kB around the element) can be used as a means to verify such elements (by measuring the transcription of the gene of interest) or to detect novel control elements (e.g., by tiling 100 kb upstream and downstream of the TSS of the gene of interest). In addition, targeting of putative control elements can be useful in the context of understanding genetic causes of disease. Many mutations and common SNP variants associated with disease phenotypes are located outside coding regions. Targeting of such regions with either the activation or repression systems described herein can be followed by readout of transcription of either a) a set of putative targets (e.g., a set of genes located in closest proximity to the control element) or b) whole-transcriptome readout by e.g., RNAseq or microarray. This would allow for the identification of likely candidate genes involved in the disease phenotype. Such candidate genes could be useful as novel drug targets.

[0495] Histone acetyltransferase (HAT) inhibitors are mentioned herein. However, an alternative embodiment is for the one or more functional domains to comprise an acetyltransferase, preferably a histone acetyltransferase. These are useful in the field of epigenomics, for example in methods of interrogating the epigenome. Methods of interrogating the epigenome may include, for example, targeting epigenomic sequences. Targeting epigenomic sequences may include the nucleic acid component molecule being directed to an epigenomic target sequence. Epigenomic target sequence may include a promoter, silencer, or an enhancer sequence.

### Saturating Mutagenesis

[0496] The compositions herein can be used to perform saturating or deep scanning mutagenesis of genomic loci in conjunction with a cellular phenotype—for instance, for determining critical minimal features and discrete vulnerabilities of functional elements required for gene expression, drug resistance, and reversal of disease. By saturating or deep scanning mutagenesis is meant that every or essentially every DNA base is cut within the genomic loci. A library of Cas1 effector protein nucleic acid component molecules may be introduced into a population of cells. The library may be introduced, such that each cell receives a single nucleic acid component. In the case where the library is introduced by transduction of a viral vector, as described herein, a low multiplicity of infection (MOI) is used. The library may include nucleic acid components targeting every sequence upstream of a (targeted adjacent motif) (TAM) sequence in a genomic locus. The library may include at least 100 non-overlapping genomic sequences upstream of a TAMsequence for every 1000 base pairs within the genomic locus. The library may include nucleic acid components targeting sequences upstream of at least one different TAMsequence. The composition may include more than one TnpB polypeptide. Any TnpB polypeptide protein as described herein, including orthologues or engineered TnpB polypeptides. The frequency of off target sites for a nucleic acid component may be less than 500. Off target scores may be generated to select nucleic acid components with the lowest off target sites. Any phenotype determined to be associated with cutting at a nucleic acid component target site may be confirmed by using nucleic acid components targeting the same site in a single experiment. Validation of a target site may also be performed by using a modified TnpB polypeptide, as described herein, and two nucleic acid components targeting the genomic site of interest. Not being bound by a theory, a target site is a true hit if the change in phenotype is observed in validation experiments.

[0497] The genomic loci may include at least one continuous genomic region. The at least one continuous genomic region may comprise up to the entire genome. The at least one continuous genomic region may comprise a functional element of the genome. The functional element may be within a non-coding region, coding gene, intronic region, promoter, or enhancer. The at least one continuous genomic region may comprise at least 1 kb, preferably at least 50 kb of genomic DNA. The at least one continuous genomic region may comprise a transcription factor binding site. The at least one continuous genomic region may comprise a region of DNase I hypersensitivity. The at least one continuous genomic region may comprise a transcription enhancer or repressor element. The at least one continuous genomic region may comprise a site enriched for an epigenetic signature. The at least one continuous genomic DNA region may comprise an epigenetic insulator. The at least one continuous genomic region may comprise two or more continuous genomic regions that physically interact. Genomic regions that interact may be determined by ‘4C technology’. 4C technology allows the screening of the entire genome in an unbiased manner for DNA segments that physically interact with a DNA fragment of choice, as is described in Zhao et al. ((2006) Nat Genet 38, 1341-7) and in U.S. Pat. No. 8,642,295, both incorporated herein by reference in its entirety. The epigenetic signature may be histone acetylation, histone methylation, histone ubiquitination, histone phosphorylation, DNA methylation, or a lack thereof.

[0498] The compositions for saturating or deep scanning mutagenesis can be used in a population of cells. The compositions can be used in eukaryotic cells, including but not limited to mammalian and plant cells. The population of cells may be prokaryotic cells. The population of eukaryotic cells may be a population of embryonic stem (ES) cells, neuronal cells, epithelial cells, immune cells, endocrine cells, muscle cells, erythrocytes, lymphocytes, plant cells, or yeast cells.

[0499] In one aspect, the present invention provides for a method of screening for functional elements associated with a change in a phenotype. The library may be introduced into a population of cells that are adapted to contain a TnpB polypeptide. The cells may be sorted into at least two groups based on the phenotype. The phenotype may be expression of a gene, cell growth, or cell viability. The relative representation of the nucleic acid component molecules present in each group are determined, whereby genomic sites associated with the change in phenotype are determined by the representation of nucleic acid component molecules present in each group. The change in phenotype may be a change in expression of a gene of interest. The gene of interest may be upregulated, downregulated, or knocked out. The cells may be sorted into a high expression group and a low expression group. The population of cells may include a reporter construct that is used to determine the phenotype. The reporter construct may include a detectable marker. Cells may be sorted by use of the detectable marker.

[0500] In another aspect, the present invention provides for a method of screening for genomic sites associated with resistance to a chemical compound. The chemical compound may be a drug or pesticide. The library may be introduced into a population of cells that are adapted to contain a TnpB polypeptide, wherein each cell of the population contains no more than one nucleic acid component molecule; the population of cells are treated with the chemical compound; and the representation of nucleic acid component molecules are determined after treatment with the chemical compound at a later time point as compared to an early time point, whereby genomic sites associated with resistance to the chemical compound are determined by enrichment of nucleic acid components. Representation of nucleic acid components may be determined by deep sequencing methods.

[0501] Useful in the practice of the instant invention utilizing compositions are methods used in compositions and reference is made to the article entitled BCL11A enhancer dissection by Cas-mediated in situ saturating mutagenesis. Canver, M. C., Smith, E. C., Sher, F., Pinello, L., Sanjana, N. E., Shalem, O., Chen, D. D., Schupp, P. G., Vinjamur, D. S., Garcia, S. P., Luc, S., Kurita, R., Nakamura, Y., Fujiwara, Y., Maeda, T., Yuan, G., Zhang, F., Orkin, S. H., & Bauer, D. E. DOI: 10.1038/nature15521, published online Sep. 16, 2015, the article is herein incorporated by reference and discussed briefly below:

[0502] Canver et al. involves novel pooled guide RNA libraries to perform in situ saturating mutagenesis of the human and mouse BCL11A erythroid enhancers previously identified as an enhancer associated with fetal hemoglobin (HbF) level and whose mouse ortholog is necessary for erythroid BCL11A expression. This approach revealed critical minimal features and discrete vulnerabilities of these enhancers. Through editing of primary human progenitors and mouse transgenesis, the authors validated the BCL 11A erythroid enhancer as a target for HbF reinduction. The authors generated a detailed enhancer map that informs therapeutic genome editing.

### Modification of a Cell or Organism

[0503] The present disclosure further provides cells comprising one or more components of the systems herein, e.g., the TnpB polypeptide and/or nucleic acid component(s). Also provided include cells modified by the systems and methods herein, and cell cultures, tissues, organs, organism comprising such cells or progeny thereof. The invention in one embodiment comprehends a method of modifying a cell or organism. The cell may be a prokaryotic cell or a eukaryotic cell. The cell may be a mammalian cell. The mammalian cell many be a non-human primate, bovine, porcine, rodent or mouse cell. The cell may be a non-mammalian eukaryotic cell such as poultry, fish, or shrimp. The cell may also be a plant cell. The plant cell may be of a crop plant such as cassava, corn, sorghum, wheat, or rice. The plant cell may also be of an algae, tree, or vegetable. The modification introduced to the cell by the present invention may be such that the cell and progeny of the cell are altered for improved production of biologic products such as an antibody, starch, alcohol, or other desired cellular output. The modification introduced to the cell by the present invention may be such that the cell and progeny of the cell include an alteration that changes the biologic product produced.

### Therapeutic Uses and Methods of Treatment

[0504] Also provided herein are methods of diagnosing, prognosing, treating, and/or preventing a disease, state, or condition in or of a subject. Generally, the methods of diagnosing, prognosing, treating, and/or preventing a disease, state, or condition in or of a subject can include modifying a polynucleotide in a subject or cell thereof using a composition, system, or component thereof described herein and/or include detecting a diseased or healthy polynucleotide in a subject or cell thereof using a composition, system, or component thereof described herein. In one embodiment, the method of treatment or prevention can include using a composition, system, or component thereof to modify a polynucleotide of an infectious organism (e.g., bacterial or virus) within a subject or cell thereof. In one embodiment, the method of treatment or prevention can include using a composition, system, or component thereof to modify a polynucleotide of an infectious organism or symbiotic organism within a subject. The composition, system, and components thereof can be used to develop models of diseases, states, or conditions. The composition, system, and components thereof can be used to detect a disease state or correction thereof, such as by a method of treatment or prevention described herein. The composition, system, and components thereof can be used to screen and select cells that can be used, for example, as treatments or preventions described herein. The composition, system, and components thereof can be used to develop biologically active agents that can be used to modify one or more biologic functions or activities in a subject or a cell thereof.

[0505] In general, the method can include delivering a composition, system, and/or component thereof to a subject or cell thereof, or to an infectious or symbiotic organism by a suitable delivery technique and/or composition. Once administered the components can operate as described elsewhere herein to elicit a nucleic acid modification event. In some aspects, the nucleic acid modification event can occur at the genomic, epigenomic, and/or transcriptomic level. DNA and/or RNA cleavage, gene activation, and/or gene deactivation can occur. Additional features, uses, and advantages are described in greater detail below. On the basis of this concept, several variations are appropriate to elicit a genomic locus event, including DNA cleavage, gene activation, or gene deactivation. Using the provided compositions, the person skilled in the art can advantageously and specifically target single or multiple loci with the same or different functional domains to elicit one or more genomic locus events. In addition to treating and/or preventing a disease in a subject, the compositions may be applied in a wide variety of methods for screening in libraries in cells and functional modeling in vivo (e.g., gene activation of lincRNA and identification of function; gain-of-function modeling; loss-of-function modeling; the use the compositions of the invention to establish cell lines and transgenic animals for optimization and screening purposes).

[0506] The composition, system, and components thereof described elsewhere herein can be used to treat and/or prevent a disease, such as a genetic and/or epigenetic disease, in a subject. The composition, system, and components thereof described elsewhere herein can be used to treat and/or prevent genetic infectious diseases in a subject, such as bacterial infections, viral infections, fungal infections, parasite infections, and combinations thereof. The composition, system, and components thereof described elsewhere herein can be used to modify the composition or profile of a microbiome in a subject, which can in turn modify the health status of the subject. The composition, system, described herein can be used to modify cells ex vivo, which can then be administered to the subject whereby the modified cells can treat or prevent a disease or symptom thereof. This is also referred to in some contexts as adoptive therapy. The composition, system, described herein can be used to treat mitochondrial diseases, where the mitochondrial disease etiology involves a mutation in the mitochondrial DNA.

[0507] Also provided is a method of treating a subject, e.g., a subject in need thereof, comprising inducing gene editing by transforming the subject with the polynucleotide encoding one or more components of the composition, system, or complex or any of polynucleotides or vectors described herein and administering them to the subject. A suitable repair template may also be provided, for example delivered by a vector comprising said repair template. The repair template may be a recombination template herein. Also provided is a method of treating a subject, e.g., a subject in need thereof, comprising inducing transcriptional activation or repression of multiple target gene loci by transforming the subject with the polynucleotides or vectors described herein, wherein said polynucleotide or vector encodes or comprises one or more components of composition, system, complex or component thereof comprising multiple TnpB polypeptides. Where any treatment is occurring ex vivo, for example in a cell culture, then it will be appreciated that the term ‘subject’ may be replaced by the phrase “cell or cell culture.”

[0508] Also provided is a method of treating a subject, e.g., a subject in need thereof, comprising inducing gene editing by transforming the subject with the TnpB polypeptide(s), advantageously encoding and expressing in vivo the remaining portions of the composition, system, (e.g., RNA). A suitable repair template may also be provided, for example delivered by a vector comprising said repair template. Also provided is a method of treating a subject, e.g., a subject in need thereof, comprising inducing transcriptional activation or repression by transforming the subject with the TnpB polypeptide(s) advantageously encoding and expressing in vivo the remaining portions of the composition, system, (e.g., nucleic acid component molecule); advantageously in one embodiment the TnpB polypeptide is a catalytically inactive TnpB polypeptide and includes one or more associated functional domains. Where any treatment is occurring ex vivo, for example in a cell culture, then it will be appreciated that the term ‘subject’ may be replaced by the phrase “cell or cell culture.”

[0509] One or more components of the composition and system described herein can be included in a composition, such as a pharmaceutical composition, and administered to a host individually or collectively. Alternatively, these components may be provided in a single composition for administration to a host. Administration to a host may be performed via viral vectors known to the skilled person or described herein for delivery to a host (e.g., lentiviral vector, adenoviral vector, AAV vector). As explained herein, use of different selection markers (e.g., for lentiviral nucleic acid component selection) and concentration of nucleic acid component (e.g., dependent on whether multiple nucleic acid components are used) may be advantageous for eliciting an improved effect.

[0510] Thus, also described herein are methods of inducing one or more polynucleotide modifications in a eukaryotic or prokaryotic cell or component thereof (e.g., a mitochondria) of a subject, infectious organism, and/or organism of the microbiome of the subject. The modification can include the introduction, deletion, or substitution of one or more nucleotides at a target sequence of a polynucleotide of one or more cell(s). The modification can occur in vitro, ex vivo, in situ, or in vivo.

[0511] In one embodiment, the method of treating or inhibiting a condition or a disease caused by one or more mutations in a genomic locus in a eukaryotic organism or a non-human organism can include manipulation of a target sequence within a coding, non-coding or regulatory element of said genomic locus in a target sequence in a subject or a non-human subject in need thereof comprising modifying the subject or a non-human subject by manipulation of the target sequence and wherein the condition or disease is susceptible to treatment or inhibition by manipulation of the target sequence including providing treatment comprising delivering a composition comprising the particle delivery system or the delivery system or the virus particle of any one of the above embodiment or the cell of any one of the above embodiment.

[0512] Also provided herein is the use of the particle delivery system or the delivery system or the virus particle of any one of the above embodiments or the cell of any one of the above embodiments in ex vivo or in vivo gene or genome editing; or for use in in vitro, ex vivo or in vivo gene therapy. Also provided herein are particle delivery systems, non-viral delivery systems, and/or the virus particle of any one of the above embodiments or the cell of any one of the above embodiments used in the manufacture of a medicament for in vitro, ex vivo or in vivo gene or genome editing or for use in in vitro, ex vivo or in vivo gene therapy or for use in a method of modifying an organism or a non-human organism by manipulation of a target sequence in a genomic locus associated with a disease or in a method of treating or inhibiting a condition or disease caused by one or more mutations in a genomic locus in a eukaryotic organism or a non-human organism.

[0513] In one embodiment, polynucleotide modification can include the introduction, deletion, or substitution of 1-75 nucleotides at each target sequence of said polynucleotide of said cell(s). The modification can include the introduction, deletion, or substitution of at least 1, 5, 10, 11, 12, 13, 14, 15, 16, 17, 18, 19, 20, 21, 22, 23, 24, 25, 26, 27, 28, 29, 30, 35, 40, 45, 50, or 75 nucleotides at each target sequence. The modification can include the introduction, deletion, or substitution of at least 5, 10, 11, 12, 13, 14, 15, 16, 17, 18, 19, 20, 21, 22, 23, 24, 25, 26, 27, 28, 29, 30, 35, 40, 45, 50, or 75 nucleotides at each target sequence of said cell(s). The modification can include the introduction, deletion, or substitution of at least 10, 11, 12, 13, 14, 15, 16, 17, 18, 19, 20, 21, 22, 23, 24, 25, 26, 27, 28, 29, 30, 35, 40, 45, 50, or 75 nucleotides at each target sequence of said cell(s). The modification can include the introduction, deletion, or substitution of at least 20, 21, 22, 23, 24, 25, 26, 27, 28, 29, 30, 35, 40, 45, 50, or 75 nucleotides at each target sequence of said cell(s). The modification can include the introduction, deletion, or substitution of at least 40, 45, 50, 75, 100, 200, 300, 400 or 500 nucleotides at each target sequence of said cell(s). The modification can include the introduction, deletion, or substitution of at least 500, 600, 700, 800, 900, 1000, 1100, 1200, 1300, 1400, 1500, 1600, 1700, 1800, 1900, 2000, 2100, 2200, 2300, 2400, 2500, 2600, 2700, 2800, 2900, 3000, 3100, 3200, 3300, 3400, 3500, 3600, 3700, 3800, 3900, 4000, 4100, 4200, 4300, 4400, 4500, 4600, 4700, 4800, 4900, 5000, 5100, 5200, 5300, 5400, 5500, 5600, 5700, 5800, 5900, 6000, 6100, 6200, 6300, 6400, 6500, 6600, 6700, 6800, 6900, 7000, 7100, 7200, 7300, 7400, 7500, 7600, 7700, 7800, 7900, 8000, 8100, 8200, 8300, 8400, 8500, 8600, 8700, 8800, 8900, 9000, 9100, 9200, 9300, 9400, 9500, 9600, 9700, 9800, or 9900 to 10000 nucleotides at each target sequence of said cell(s).

[0514] In one embodiment, the modifications can include the introduction, deletion, or substitution of nucleotides at each target sequence of said cell(s) via nucleic acid components (e.g., nucleic acid component molecule(s) RNA(s) or nucleic acid component(s)), such as those mediated by a composition, system, or a component thereof described elsewhere herein. In one embodiment, the modifications can include the introduction, deletion, or substitution of nucleotides at a target or random sequence of said cell(s) via a composition, system, or technique.

[0515] In one embodiment, the composition, system, or component thereof can promote Non-Homologous End-Joining (NHEJ). In one embodiment, modification of a polynucleotide by a composition, system, or a component thereof, such as a diseased polynucleotide, can include NHEJ. In one embodiment, promotion of this repair pathway by the composition, system, or a component thereof can be used to target gene or polynucleotide specific knock-outs and/or knock-ins. In one embodiment, promotion of this repair pathway by the composition, system, or a component thereof can be used to generate NHEJ-mediated indels. Nuclease-induced NHEJ can also be used to remove (e.g., delete) sequence in a gene of interest. Generally, NHEJ repairs a double-strand break in the DNA by joining together the two ends; however, generally, the original sequence is restored only if two compatible ends, exactly as they were formed by the double-strand break, are perfectly ligated. The DNA ends of the double-strand break are frequently the subject of enzymatic processing, resulting in the addition or removal of nucleotides, at one or both strands, prior to rejoining of the ends. This results in the presence of insertion and/or deletion (indel) mutations in the DNA sequence at the site of the NHEJ repair. The indel can range in size from 1-50 or more base pairs. In one embodiment thee indel can be 1, 2, 3, 4, 5, 6, 7, 8, 9, 10, 11, 12, 13, 14, 15, 16, 17, 18, 19, 20, 21, 22, 23, 24, 25, 26, 27, 28, 29, 30, 31, 32, 33, 34, 35, 36, 37, 38, 39, 40, 41, 42, 43, 44, 45, 46, 47, 48, 49, 50, 51, 52, 53, 54, 55, 56, 57, 58, 59, 60, 61, 62, 63, 64, 65, 66, 67, 68, 69, 70, 71, 72, 73, 74, 75, 76, 77, 78, 79, 80, 81, 82, 83, 84, 85, 86, 87, 88, 89, 90, 91, 92, 93, 94, 95, 96, 97, 98, 99, 100, 101, 102, 103, 104, 105, 106, 107, 108, 109, 110, 111, 112, 113, 114, 115, 116, 117, 118, 119, 120, 121, 122, 123, 124, 125, 126, 127, 128, 129, 130, 131, 132, 133, 134, 135, 136, 137, 138, 139, 140, 141, 142, 143, 144, 145, 146, 147, 148, 149, 150, 151, 152, 153, 154, 155, 156, 157, 158, 159, 160, 161, 162, 163, 164, 165, 166, 167, 168, 169, 170, 171, 172, 173, 174, 175, 176, 177, 178, 179, 180, 181, 182, 183, 184, 185, 186, 187, 188, 189, 190, 191, 192, 193, 194, 195, 196, 197, 198, 199, 200, 201, 202, 203, 204, 205, 206, 207, 208, 209, 210, 211, 212, 213, 214, 215, 216, 217, 218, 219, 220, 221, 222, 223, 224, 225, 226, 227, 228, 229, 230, 231, 232, 233, 234, 235, 236, 237, 238, 239, 240, 241, 242, 243, 244, 245, 246, 247, 248, 249, 250, 251, 252, 253, 254, 255, 256, 257, 258, 259, 260, 261, 262, 263, 264, 265, 266, 267, 268, 269, 270, 271, 272, 273, 274, 275, 276, 277, 278, 279, 280, 281, 282, 283, 284, 285, 286, 287, 288, 289, 290, 291, 292, 293, 294, 295, 296, 297, 298, 299, 300, 301, 302, 303, 304, 305, 306, 307, 308, 309, 310, 311, 312, 313, 314, 315, 316, 317, 318, 319, 320, 321, 322, 323, 324, 325, 326, 327, 328, 329, 330, 331, 332, 333, 334, 335, 336, 337, 338, 339, 340, 341, 342, 343, 344, 345, 346, 347, 348, 349, 350, 351, 352, 353, 354, 355, 356, 357, 358, 359, 360, 361, 362, 363, 364, 365, 366, 367, 368, 369, 370, 371, 372, 373, 374, 375, 376, 377, 378, 379, 380, 381, 382, 383, 384, 385, 386, 387, 388, 389, 390, 391, 392, 393, 394, 395, 396, 397, 398, 399, 400, 401, 402, 403, 404, 405, 406, 407, 408, 409, 410, 411, 412, 413, 414, 415, 416, 417, 418, 419, 420, 421, 422, 423, 424, 425, 426, 427, 428, 429, 430, 431, 432, 433, 434, 435, 436, 437, 438, 439, 440, 441, 442, 443, 444, 445, 446, 447, 448, 449, 450, 451, 452, 453, 454, 455, 456, 457, 458, 459, 460, 461, 462, 463, 464, 465, 466, 467, 468, 469, 470, 471, 472, 473, 474, 475, 476, 477, 478, 479, 480, 481, 482, 483, 484, 485, 486, 487, 488, 489, 490, 491, 492, 493, 494, 495, 496, 497, 498, 499, or 500 base pairs or more. If a double-strand break is targeted near to a short target sequence, the deletion mutations caused by the NHEJ repair often span, and therefore remove, the unwanted nucleotides. For the deletion of larger DNA segments, introducing two double-strand breaks, one on each side of the sequence, can result in NHEJ between the ends with removal of the entire intervening sequence. Both of these approaches can be used to delete specific DNA sequences.

[0516] In one embodiment, composition, system, mediated NHEJ can be used in the method to delete small sequence motifs. In one embodiment, composition, system, mediated NHEJ can be used in the method to generate NHEJ-mediate indels that can be targeted to the gene, e.g., a coding region, e.g., an early coding region of a gene of interest can be used to knockout (i.e., eliminate expression of) a gene of interest. For example, early coding region of a gene of interest includes sequence immediately following a transcription start site, within a first exon of the coding sequence, or within 500 bp of the transcription start site (e.g., less than 500, 450, 400, 350, 300, 250, 200, 150, 100 or 50 bp). In an embodiment, in which a nucleic acid component and TnpB polypeptide generate a double strand break for the purpose of inducing NHEJ-mediated indels, a nucleic acid component may be configured to position one double-strand break in close proximity to a nucleotide of the target position. In an embodiment, the cleavage site may be between 0-500 bp away from the target position (e.g., less than 500, 400, 300, 200, 100, 50, 40, 30, 25, 20, 15, 10, 9, 8, 7, 6, 5, 4, 3, 2 or 1 bp from the target position). In an embodiment, in which two component RNAs complexing with one or more nickases induce two single strand breaks for the purpose of inducing NHEJ-mediated indels, two component RNAs may be configured to position two single-strand breaks to provide for NHEJ repair a nucleotide of the target position.

[0517] For minimization of toxicity and off-target effect, it may be important to control the concentration of TnpB polypeptide mRNA and component RNA delivered. Optimal concentrations of TnpB polypeptide mRNA and component RNA can be determined by testing different concentrations in a cellular or non-human eukaryote animal model and using deep sequencing the analyze the extent of modification at potential off-target genomic loci. Alternatively, to minimize the level of toxicity and off-target effect, nickase mRNA (for example a mutated TnpB) can be delivered with a pair of nucleic acid components targeting a site of interest.

[0518] Typically, in the context of an endogenous TnpB polypeptide, formation of a TnpB polypeptide or complex (comprising a polynucleotide component sequence hybridized to a target sequence and complexed with one or more TnpB polypeptides) results in cleavage, nicking, and/or another modification of one or both strands in or near (e.g., within 1, 2, 3, 4, 5, 6, 7, 8, 9, 10, 20, 50, or more base pairs from) the target sequence.

[0519] In one embodiment, a method of modifying a target polynucleotide in a cell to treat or prevent a disease can include allowing a composition, system, or component thereof to bind to the target polynucleotide, e.g., to effect cleavage, nicking, or other modification as the composition, system, is capable of said target polynucleotide, thereby modifying the target polynucleotide, wherein the composition, system, or component thereof, complex with a nucleic acid component molecule sequence, and hybridize said nucleic acid component molecule sequence to a target sequence within the target polynucleotide, wherein said nucleic acid component molecule sequence is optionally linked to a nucleic acid component scaffold sequence. In some of these embodiments, the composition, system, or component thereof can be or include a TnpB polypeptide complexed with a nucleic acid component molecule sequence. In one embodiment, modification can include cleaving or nicking one or two strands at the location of the target sequence by one or more components of the composition, system, or component thereof.

[0520] The cleavage, nicking, or other modification capable of being performed by the composition, system, can modify transcription of a target polynucleotide. In one embodiment, modification of transcription can include decreasing transcription of a target polynucleotide. In one embodiment, modification can include increasing transcription of a target polynucleotide. In one embodiment, the method includes repairing said cleaved target polynucleotide by homologous recombination with an recombination template polynucleotide, wherein said repair results in a modification such as, but not limited to, an insertion, deletion, or substitution of one or more nucleotides of said target polynucleotide. In one embodiment, said modification results in one or more amino acid changes in a protein expressed from a gene comprising the target sequence. In one embodiment, the modification imparted by the composition, system, or component thereof provides a transcript and/or protein that can correct a disease or a symptom thereof, including but not limited to, any of those described in greater detail elsewhere herein.

[0521] In one embodiment, the method of treating or preventing a disease can include delivering one or more vectors or vector systems to a cell, such as a eukaryotic or prokaryotic cell, wherein one or more vectors or vector systems include the composition, system, or component thereof. In one embodiment, the vector(s) or vector system(s) can be a viral vector or vector system, such as an AAV or lentiviral vector system, which are described in greater detail elsewhere herein. In one embodiment, the method of treating or preventing a disease can include delivering one or more viral particles, such as an AAV or lentiviral particle, containing the composition, system, or component thereof. In one embodiment, the viral particle has a tissue specific tropism. In one embodiment, the viral particle has a liver, muscle, eye, heart, pancreas, kidney, neuron, epithelial cell, endothelial cell, astrocyte, glial cell, immune cell, or red blood cell specific tropism.

[0522] It will be understood that the composition and system, according to the invention as described herein, such as the composition and system, for use in the methods according to the invention as described herein, may be suitably used for any type of application known for composition, system, preferably in eukaryotes. In certain aspects, the application is therapeutic, preferably therapeutic in a eukaryote organism, such as including but not limited to animals (including human), plants, algae, fungi (including yeasts), etc. Alternatively, or in addition, in certain aspects, the application may involve accomplishing or inducing one or more particular traits or characteristics, such as genotypic and/or phenotypic traits or characteristics, as also described elsewhere herein.

### Treating Diseases of the Circulatory System

[0523] In one embodiment, the composition, system, and/or component thereof described herein can be used to treat and/or prevent a circulatory system disease. Exemplary disease is provided, for example, in Tables 2 and 3. In one embodiment the plasma exosomes of Wahlgren et al. (Nucleic Acids Research, 2012, Vol. 40, No. 17 e130) can be used to deliver the composition, system, and/or component thereof described herein to the blood. In one embodiment, the circulatory system disease can be treated by using a lentivirus to deliver the composition, system, described herein to modify hematopoietic stem cells (HSCs) in vivo or ex vivo (see e.g., Drakopoulou, “Review Article, The Ongoing Challenge of Hematopoietic Stem Cell-Based Gene Therapy for β-Thalassemia,” Stem Cells International, Volume 2011, Article ID 987980, 10 pages, doi:10.4061/2011/987980, which can be adapted for use with the composition, system, herein in view of the description herein). In one embodiment, the circulatory system disorder can be treated by correcting HSCs as to the disease using a composition, system, herein or a component thereof, wherein the composition, system, optionally includes a suitable HDR repair template (see e.g., Cavazzana, “Outcomes of Gene Therapy for B-Thalassemia Major via Transplantation of Autologous Hematopoietic Stem Cells Transduced Ex Vivo with a Lentiviral βA-T87Q-Globin Vector.”; Cavazzana-Calvo, “Transfusion independence and HMGA2 activation after gene therapy of human β-thalassaemia”, Nature 467, 318-322 (16 Sep. 2010) doi:10.1038/nature09328; Nienhuis, “Development of Gene Therapy for Thalassemia, Cold Spring Harbor Perspectives in Medicine, doi: 10.1101/cshperspect.a011833 (2012), LentiGlobin BB305, a lentiviral vector containing an engineered β-globin gene (βA-T87Q); and Xie et al., “Seamless gene correction of β-thalassaemia mutations in patient-specific iPSCs using CRISPR/Cas9 and piggyback” Genome Research gr. 173427.114 (2014) www.genome.org/cgi/doi/10.1101/gr.173427.114 (Cold Spring Harbor Laboratory Press; Watts, “Hematopoietic Stem Cell Expansion and Gene Therapy” Cytotherapy 13(10):1164-1171. doi:10.3109/14653249.2011.620748 (2011), which can be adapted for use with the composition, system, herein in view of the description herein). In one embodiment, iPSCs can be modified using a composition, system, described herein to correct a disease polynucleotide associated with a circulatory disease. In this regard, the teachings of Xu et al. (Sci Rep. 2015 Jul. 9; 5:12065. doi: 10.1038/srep12065) and Song et al. (Stem Cells Dev. 2015 May 1; 24(9):1053-65. doi: 10.1089/scd.2014.0347. Epub 2015 Feb. 5) with respect to modifying iPSCs can be adapted for use in view of the description herein with the composition, system, described herein.

[0524] The term “Hematopoietic Stem Cell” or “HSC” refers broadly those cells considered to be an HSC, e.g., blood cells that give rise to all the other blood cells and are derived from mesoderm; located in the red bone marrow, which is contained in the core of most bones. HSCs of the invention include cells having a phenotype of hematopoietic stem cells, identified by small size, lack of lineage (lin) markers, and markers that belong to the cluster of differentiation series, like: CD34, CD38, CD90, CD133, CD105, CD45, and also c-kit,—the receptor for stem cell factor. Hematopoietic stem cells are negative for the markers that are used for detection of lineage commitment, and are, thus, called Lin−; and, during their purification by FACS, a number of up to 14 different mature blood-lineage markers, e.g., CD13 & CD33 for myeloid, CD71 for erythroid, CD19 for B cells, CD61 for megakaryocytic, etc. for humans; and, B220 (murine CD45) for B cells, Mac-1 (CD11b/CD18) for monocytes, Gr-1 for Granulocytes, Ter119 for erythroid cells, I17Ra, CD3, CD4, CD5, CD8 for T cells, etc. Mouse HSC markers: CD34lo/−, SCA-1+, Thy 1.1+/lo, CD38+, C-kit+, lin−, and Human HSC markers: CD34+, CD59+, Thy1/CD90+, CD38lo/−, C-kit/CD117+, and lin−. HSCs are identified by markers. Hence in embodiments discussed herein, the HSCs can be CD34+ cells. HSCs can also be hematopoietic stem cells that are CD34−/CD38−. Stem cells that may lack c-kit on the cell surface that are considered in the art as HSC's are within the ambit of the invention, as well as CD133+ cells likewise considered HSCs in the art.

[0525] In one embodiment, the treatment or prevention for treating a circulatory system or blood disease can include modifying a human cord blood cell with any modification described herein. In one embodiment, the treatment or prevention for treating a circulatory system or blood disease can include modifying a granulocyte colony-stimulating factor-mobilized peripheral blood cell (mPB) with any modification described herein. In one embodiment, the human cord blood cell or mPB can be CD34+. In one embodiment, the cord blood cell(s) or mPB cell(s) modified can be autologous. In one embodiment, the cord blood cell(s) or mPB cell(s) can be allogenic. In addition to the modification of the disease gene(s), allogenic cells can be further modified using the composition, system, described herein to reduce the immunogenicity of the cells when delivered to the recipient. Such techniques are described elsewhere herein and e.g., Cartier, “MINI-SYMPOSIUM: X-Linked Adrenoleukodystrophypa, Hematopoietic Stem Cell Transplantation and Hematopoietic Stem Cell Gene Therapy in X-Linked Adrenoleukodystrophy,” Brain Pathology 20 (2010) 857-862, which can be adapted for use with the composition, system, herein. The modified cord blood cell(s) or mPB cell(s) can be optionally expanded in vitro. The modified cord blood cell(s) or mPB cell(s) can be derived to a subject in need thereof using any suitable delivery technique.

[0526] The compositions may be engineered to target genetic locus or loci in HSCs. In one embodiment, the TnpB polypeptide(s) can be codon-optimized for a eukaryotic cell and especially a mammalian cell, e.g., a human cell, for instance, HSC, or iPSC and nucleic acid component targeting a locus or loci in HSC, such as circulatory disease, can be prepared. These may be delivered via particles. The particles may be formed by the TnpB polypeptide and the nucleic acid component being admixed. The nucleic acid component and TnpB polypeptide mixture can be, for example, admixed with a mixture comprising or consisting essentially of or consisting of surfactant, phospholipid, biodegradable polymer, lipoprotein and alcohol, whereby particles containing the nucleic acid component and TnpB polypeptide may be formed. The invention comprehends so making particles and particles from such a method as well as uses thereof. Particles suitable delivery of the composition in the context of blood or circulatory system or HSC delivery to the blood or circulatory system are described in greater detail elsewhere herein.

[0527] In one embodiment, after ex vivo modification the HSCs or iPCS can be expanded prior to administration to the subject. Expansion of HSCs can be via any suitable method such as that described by, Lee, “Improved ex vivo expansion of adult hematopoietic stem cells by overcoming CUL4-mediated degradation of HOXB4.” Blood. 2013 May 16; 121(20):4082-9. doi: 10.1182/blood-2012-09-455204. Epub 2013 Mar. 21.

[0528] In one embodiment, the HSCs or iPSCs modified can be autologous. In one embodiment, the HSCs or iPSCs can be allogenic. In addition to the modification of the disease gene(s), allogenic cells can be further modified using the composition, system, described herein to reduce the immunogenicity of the cells when delivered to the recipient. Such techniques are described elsewhere herein and e.g., Cartier, “MINI-SYMPOSIUM: X-Linked Adrenoleukodystrophypa, Hematopoietic Stem Cell Transplantation and Hematopoietic Stem Cell Gene Therapy in X-Linked Adrenoleukodystrophy,” Brain Pathology 20 (2010) 857-862, which can be adapted for use with the composition, system, herein.

### Treating Neurological Diseases

[0529] In one embodiment, the compositions, systems, described herein can be used to treat diseases of the brain and CNS. Delivery options for the brain include encapsulation of TnpB polypeptide and nucleic acid component molecule in the form of either DNA or RNA into liposomes and conjugating to molecular Trojan horses for trans-blood brain barrier (BBB) delivery. Molecular Trojan horses have been shown to be effective for delivery of B-gal expression vectors into the brain of non-human primates. The same approach can be used to delivery vectors containing TnpB polypeptide and nucleic acid component molecule. For instance, Xia C F and Boado R J, Pardridge W M (“Antibody-mediated targeting of siRNA via the human insulin receptor using avidin-biotin technology.” Mol Pharm. 2009 May-June; 6(3):747-51. doi: 10.1021/mp800194) describes how delivery of short interfering RNA (siRNA) to cells in culture, and in vivo, is possible with combined use of a receptor-specific monoclonal antibody (mAb) and avidin-biotin technology. The authors also report that because the bond between the targeting mAb and the siRNA is stable with avidin-biotin technology, and RNAi effects at distant sites such as brain are observed in vivo following an intravenous administration of the targeted siRNA, the teachings of which can be adapted for use with the compositions, systems, herein. In other embodiments, an artificial virus can be generated for CNS and/or brain delivery. See e.g., Zhang et al. (Mol Ther. 2003 January; 7(1):11-8.)), the teachings of which can be adapted for use with the compositions, systems, herein.

### Treating Hearing Diseases

[0530] In one embodiment the composition and system described herein can be used to treat a hearing disease or hearing loss in one or both ears. Deafness is often caused by lost or damaged hair cells that cannot relay signals to auditory neurons. In such cases, cochlear implants may be used to respond to sound and transmit electrical signals to the nerve cells. But these neurons often degenerate and retract from the cochlea as fewer growth factors are released by impaired hair cells.

[0531] In one embodiment, the composition, system, or modified cells can be delivered to one or both ears for treating or preventing hearing disease or loss by any suitable method or technique. Suitable methods and techniques include, but are not limited to, those set forth in US Patent Publication No. 20120328580 describes injection of a pharmaceutical composition into the ear (e.g., auricular administration), such as into the luminae of the cochlea (e.g., the Scala media, Sc vestibulae, and Sc tympani), e.g., using a syringe, e.g., a single-dose syringe. For example, one or more of the compounds described herein can be administered by intratympanic injection (e.g., into the middle ear), and/or injections into the outer, middle, and/or inner ear; administration in situ, via a catheter or pump (see e.g., McKenna et al., (U.S. Patent Publication No. 2006/0030837) and Jacobsen et al., (U.S. Pat. No. 7,206,639); administration in combination with a mechanical device such as a cochlear implant or a hearing aid, which is worn in the outer ear (see e.g., U.S. Patent Publication No. 2007/0093878, which provides an exemplary cochlear implant suitable for delivery of the compositions, systems, described herein to the car). Such methods are routinely used in the art, for example, for the administration of steroids and antibiotics into human ears. Injection can be, for example, through the round window of the ear or through the cochlear capsule. Other inner ear administration methods are known in the art (see, e.g., Salt and Plontke, Drug Discovery Today, 10:1299-1306, 2005). In one embodiment, a catheter or pump can be positioned, e.g., in the ear (e.g., the outer, middle, and/or inner ear) of a patient during a surgical procedure. In one embodiment, a catheter or pump can be positioned, e.g., in the ear (e.g., the outer, middle, and/or inner ear) of a patient without the need for a surgical procedure.

[0532] In general, the cell therapy methods described in US Patent Publication No. 20120328580 can be used to promote complete or partial differentiation of a cell to or towards a mature cell type of the inner ear (e.g., a hair cell) in vitro. Cells resulting from such methods can then be transplanted or implanted into a patient in need of such treatment. The cell culture methods required to practice these methods, including methods for identifying and selecting suitable cell types, methods for promoting complete or partial differentiation of selected cells, methods for identifying complete or partially differentiated cell types, and methods for implanting complete or partially differentiated cells are described below.

[0533] Cells suitable for use in the present invention include, but are not limited to, cells that are capable of differentiating completely or partially into a mature cell of the inner ear, e.g., a hair cell (e.g., an inner and/or outer hair cell), when contacted, e.g., in vitro, with one or more of the compounds described herein. Exemplary cells that are capable of differentiating into a hair cell include, but are not limited to stem cells (e.g., inner ear stem cells, adult stem cells, bone marrow derived stem cells, embryonic stem cells, mesenchymal stem cells, skin stem cells, iPS cells, and fat derived stem cells), progenitor cells (e.g., inner ear progenitor cells), support cells (e.g., Deiters' cells, pillar cells, inner phalangeal cells, tectal cells and Hensen's cells), and/or germ cells. The use of stem cells for the replacement of inner ear sensory cells is described in Li et al., (U.S. Patent Publication No. 2005/0287127) and Li et al., (U.S. patent application Ser. No. 11/953,797). The use of bone marrow derived stem cells for the replacement of inner ear sensory cells is described in Edge et al., PCT/US2007/084654. iPS cells are described, e.g., at Takahashi et al., Cell, Volume 131, Issue 5, Pages 861-872 (2007); Takahashi and Yamanaka, Cell 126, 663-76 (2006); Okita et al., Nature 448, 260-262 (2007); Yu, J. et al., Science 318 (5858): 1917-1920 (2007); Nakagawa et al., Nat. Biotechnol. 26:101-106 (2008); and Zaehres and Scholer, Cell 131(5):834-835 (2007). Such suitable cells can be identified by analyzing (e.g., qualitatively or quantitatively) the presence of one or more tissue specific genes. For example, gene expression can be detected by detecting the protein product of one or more tissue-specific genes. Protein detection techniques involve staining proteins (e.g., using cell extracts or whole cells) using antibodies against the appropriate antigen. In this case, the appropriate antigen is the protein product of the tissue-specific gene expression. Although, in principle, a first antibody (i.e., the antibody that binds the antigen) can be labeled, it is more common (and improves the visualization) to use a second antibody directed against the first (e.g., an anti-IgG). This second antibody is conjugated either with fluorochromes, or appropriate enzymes for colorimetric reactions, or gold beads (for electron microscopy), or with the biotin-avidin system, so that the location of the primary antibody, and thus the antigen, can be recognized.

[0534] The composition and system may be delivered to the ear by direct application of pharmaceutical composition to the outer ear, with compositions modified from US Patent Publication No. 20110142917. In one embodiment the pharmaceutical composition is applied to the ear canal. Delivery to the ear may also be referred to as aural or otic delivery.

[0535] In one embodiment, the compositions, systems, or components thereof and/or vectors or vector systems can be delivered to ear via a transfection to the inner ear through the intact round window by a novel proteidic delivery technology which may be applied to the TnpB system of the present invention (see, e.g., Qi et al., Gene Therapy (2013), 1-9). About 40 μl of 10 mM RNA may be contemplated as the dosage for administration to the ear.

[0536] According to Rejali et al. (Hear Res. 2007 June; 228(1-2):180-7), cochlear implant function can be improved by good preservation of the spiral ganglion neurons, which are the target of electrical stimulation by the implant and brain derived neurotrophic factor (BDNF) has previously been shown to enhance spiral ganglion survival in experimentally deafened ears. Rejali et al. tested a modified design of the cochlear implant electrode that includes a coating of fibroblast cells transduced by a viral vector with a BDNF gene insert. To accomplish this type of ex vivo gene transfer, Rejali et al. transduced guinea pig fibroblasts with an adenovirus with a BDNF gene cassette insert and determined that these cells secreted BDNF and then attached BDNF-secreting cells to the cochlear implant electrode via an agarose gel, and implanted the electrode in the scala tympani. Rejali et al. determined that the BDNF expressing electrodes were able to preserve significantly more spiral ganglion neurons in the basal turns of the cochlea after 48 days of implantation when compared to control electrodes and demonstrated the feasibility of combining cochlear implant therapy with ex vivo gene transfer for enhancing spiral ganglion neuron survival. Such a system may be applied to the TnpB system of the present invention for delivery to the ear.

[0537] In one embodiment, the system set forth in Mukherjea et al. (Antioxidants & Redox Signaling, Volume 13, Number 5, 2010) can be adapted for transtympanic administration of the composition, system, or component thereof to the ear. In one embodiment, a dosage of about 2 mg to about 4 mg of TnpB polypeptide for administration to a human.

[0538] In one embodiment, the system set forth in [Jung et al. (Molecular Therapy, vol. 21 no. 4, 834-841 April 2013) can be adapted for vestibular epithelial delivery of the composition, system, or component thereof to the ear. In one embodiment, a dosage of about 1 to about 30 mg of TnpB polypeptide for administration to a human.

### Treating Diseases in Non-Dividing Cells

[0539] In one embodiment, the gene or transcript to be corrected is in a non-dividing cell. Exemplary non-dividing cells are muscle cells or neurons. Non-dividing (especially non-dividing, fully differentiated) cell types present issues for gene targeting or genome engineering, for example because homologous recombination (HR) is generally suppressed in the G1 cell-cycle phase. However, while studying the mechanisms by which cells control normal DNA repair systems, Durocher discovered a previously unknown switch that keeps HR “off” in non-dividing cells and devised a strategy to toggle this switch back on. Orthwein et al. (Daniel Durocher's lab at the Mount Sinai Hospital in Ottawa, Canada) recently reported (Nature 16142, published online 9 Dec. 2015) have shown that the suppression of HR can be lifted and gene targeting successfully concluded in both kidney (293T) and osteosarcoma (U2OS) cells. Tumor suppressors, BRCA1, PALB2 and BRAC2 are known to promote DNA DSB repair by HR. They found that formation of a complex of BRCA1 with PALB2-BRAC2 is governed by a ubiquitin site on PALB2, such that action on the site by an E3 ubiquitin ligase. This E3 ubiquitin ligase is composed of KEAP1 (a PALB2-interacting protein) in complex with cullin-3 (CUL3)-RBX1. PALB2 ubiquitylation suppresses its interaction with BRCA1 and is counteracted by the deubiquitylase USP11, which is itself under cell cycle control. Restoration of the BRCA1-PALB2 interaction combined with the activation of DNA-end resection is sufficient to induce homologous recombination in G1, as measured by a number of methods including a Cas polypeptide nuclease-based gene-targeting assay directed at USP11 or KEAP1 (expressed from a pX459 vector). However, when the BRCA1-PALB2 interaction was restored in resection-competent G1 cells using either KEAP1 depletion or expression of the PALB2-KR mutant, a robust increase in gene-targeting events was detected. These teachings can be adapted for and/or applied to the compositions, systems, described herein.

[0540] Thus, reactivation of HR in cells, especially non-dividing, fully differentiated cell types is preferred, In one embodiment. In one embodiment, promotion of the BRCA1-PALB2 interaction is preferred In one embodiment. In one embodiment, the target ell is a non-dividing cell. In one embodiment, the target cell is a neuron or muscle cell. In one embodiment, the target cell is targeted in vivo. In one embodiment, the cell is in G1 and HR is suppressed. In one embodiment, use of KEAP1 depletion, for example inhibition of expression of KEAP1 activity, is preferred. KEAP1 depletion may be achieved through siRNA, for example as shown in Orthwein et al. Alternatively, expression of the PALB2-KR mutant (lacking all eight Lys residues in the BRCA1-interaction domain is preferred, either in combination with KEAP1 depletion or alone. PALB2-KR interacts with BRCA1 irrespective of cell cycle position. Thus, promotion or restoration of the BRCA1-PALB2 interaction, especially in G1 cells, is preferred. In one embodiment, especially where the target cells are non-dividing, or where removal and return (ex vivo gene targeting) is problematic, for example neuron or muscle cells. KEAP1 siRNA is available from ThermoFischer. In one embodiment, a BRCA1-PALB2 complex may be delivered to the G1 cell. In one embodiment, PALB2 deubiquitylation may be promoted for example by increased expression of the deubiquitylase USP11, so it is envisaged that a construct may be provided to promote or up-regulate expression or activity of the deubiquitylase USP11.

### Treating Diseases of the Eye

[0541] In one embodiment, the disease to be treated is a disease that affects the eyes. Thus, In one embodiment, the composition, system, or component thereof described herein is delivered to one or both eyes.

[0542] The composition, system, can be used to correct ocular defects that arise from several genetic mutations further described in Genetic Diseases of the Eye, Second Edition, edited by Elias I. Traboulsi, Oxford University Press, 2012.

[0543] In one embodiment, the condition to be treated or targeted is an eye disorder. In one embodiment, the eye disorder may include glaucoma. In one embodiment, the eye disorder includes a retinal degenerative disease. In one embodiment, the retinal degenerative disease is selected from Stargardt disease, Bardet-Biedl Syndrome, Best disease, Blue Cone Monochromacy, Choroidermia, Cone-rod dystrophy, Congenital Stationary Night Blindness, Enhanced S-Cone Syndrome, Juvenile X-Linked Retinoschisis, Leber Congenital Amaurosis, Malattia Leventinesse, Norrie Disease or X-linked Familial Exudative Vitreoretinopathy, Pattern Dystrophy, Sorsby Dystrophy, Usher Syndrome, Retinitis Pigmentosa, Achromatopsia or Macular dystrophies or degeneration, Retinitis Pigmentosa, Achromatopsia, and age related macular degeneration. In one embodiment, the retinal degenerative disease is Leber Congenital Amaurosis (LCA) or Retinitis Pigmentosa. Other exemplary eye diseases are described in greater detail elsewhere herein.

[0544] In one embodiment, the composition, system, is delivered to the eye, optionally via intravitreal injection or subretinal injection. Intraocular injections may be performed with the aid of an operating microscope. For subretinal and intravitreal injections, eyes may be prolapsed by gentle digital pressure and fundi visualized using a contact lens system consisting of a drop of a coupling medium solution on the cornea covered with a glass microscope slide coverslip. For subretinal injections, the tip of a 10-mm 34-gauge needle, mounted on a 5-μl Hamilton syringe may be advanced under direct visualization through the superior equatorial sclera tangentially towards the posterior pole until the aperture of the needle was visible in the subretinal space. Then, 2 μl of vector suspension may be injected to produce a superior bullous retinal detachment, thus confirming subretinal vector administration. This approach creates a self-sealing sclerotomy allowing the vector suspension to be retained in the subretinal space until it is absorbed by the RPE, usually within 48 h of the procedure. This procedure may be repeated in the inferior hemisphere to produce an inferior retinal detachment. This technique results in the exposure of approximately 70% of neurosensory retina and RPE to the vector suspension. For intravitreal injections, the needle tip may be advanced through the sclera 1 mm posterior to the corneoscleral limbus and 2 μl of vector suspension injected into the vitreous cavity. For intracameral injections, the needle tip may be advanced through a corneoscleral limbal paracentesis, directed towards the central cornea, and 2 μl of vector suspension may be injected. For intracameral injections, the needle tip may be advanced through a corneoscleral limbal paracentesis, directed towards the central cornea, and 2 μl of vector suspension may be injected. These vectors may be injected at titers of either 1.0-1.4×10¹⁰ or 1.0-1.4×10⁹ transducing units (TU)/ml.

[0545] In one embodiment, for administration to the eye, lentiviral vectors. In one embodiment, the lentiviral vector is an equine infectious anemia virus (EIAV) vector. Exemplary EIAV vectors for eye delivery are described in Balagaan, J Gene Med 2006; 8:275-285, Published online 21 Nov. 2005 in Wiley InterScience (www.interscience.wiley.com). DOI: 10.1002/jgm.845; Binley et al., HUMAN GENE THERAPY 23:980-991 (September 2012), which can be adapted for use with the composition, system, described herein. In one embodiment, the dosage can be 1.1×105 transducing units per eye (TU/eye) in a total volume of 100 μl.

[0546] Other viral vectors can also be used for delivery to the eye, such as AAV vectors, such as those described in Campochiaro et al., Human Gene Therapy 17:167-176 (February 2006), Millington-Ward et al. (Molecular Therapy, vol. 19 no. 4, 642-649 April 2011; Dalkara et al. (Sci Transl Med 5, 189ra76 (2013)), which can be adapted for use with the composition, system, described herein. In one embodiment, the dose can range from about 106 to 109.5 particle units. In the context of the Millington-Ward AAV vectors, a dose of about 2×1011 to about 6×1013 virus particles can be administered. In the context of Dalkara vectors, a dose of about 1×1015 to about 1×1016 vg/ml administered to a human.

[0547] In one embodiment, the sd-rxRNA® system of RXi Pharmaceuticals may be used/and or adapted for delivering composition, system, to the eye. In this system, a single intravitreal administration of 3 μg of sd-rxRNA results in sequence-specific reduction of PPIB mRNA levels for 14 days. The sd-rxRNA® system may be applied to the TnpB system of the present invention, contemplating a dose of about 3 to 20 mg of composition administered to a human.

[0548] In other embodiments, the methods of US Patent Publication No. 20130183282, which is directed to methods of cleaving a target sequence from the human rhodopsin gene, may also be modified to the TnpB system of the present invention.

[0549] In other embodiments, the methods of US Patent Publication No. 20130202678 for treating retinopathies and sight-threatening ophthalmologic disorders relating to delivering of the Puf-A gene (which is expressed in retinal ganglion and pigmented cells of eye tissues and displays a unique anti-apoptotic activity) to the sub-retinal or intravitreal space in the eye may be used or adapted. In particular, desirable targets are zgc: 193933, prdm1a, spata2, tex10, rbb4, ddx3, zp2.2, Blimp-1 and HtrA2, all of which may be targeted by the composition, system, of the present invention.

[0550] Wu (Cell Stem Cell, 13:659-62, 2013) designed a guide RNA that led Cas9 to a single base pair mutation that causes cataracts in mice, where it induced DNA cleavage. Then using either the other wild-type allele or oligos given to the zygotes repair mechanisms corrected the sequence of the broken allele and corrected the cataract-causing genetic defect in mutant mouse. This approach can be adapted to and/or applied to the TnpB compositions, systems, described herein.

[0551] US Patent Publication No. 20120159653, describes use of zinc finger nucleases to genetically modify cells, animals and proteins associated with macular degeneration (MD), the teachings of which can be applied to and/or adapted for the TnpB compositions, systems, described herein.

[0552] One aspect of US Patent Publication No. 20120159653 relates to editing of any chromosomal sequences that encode proteins associated with MD which may be applied to the TnpB system of the present invention.

### Treating Muscle Diseases and Cardiovascular Diseases

[0553] In one embodiment, the composition, system can be used to treat and/or prevent a muscle disease and associated circulatory or cardiovascular disease or disorder. The present invention also contemplates delivering the composition, system, described herein, e.g., TnpB effector protein systems, to the heart. For the heart, a myocardium tropic adeno-associated virus (AAVM) is preferred, in particular AAVM41 which showed preferential gene transfer in the heart (see, e.g., Lin-Yanga et al., PNAS, Mar. 10, 2009, vol. 106, no. 10). Administration may be systemic or local. A dosage of about 1-10×10¹⁴ vector genomes is contemplated for systemic administration. See also, e.g., Eulalio et al. (2012) Nature 492:376 and Somasuntharam et al. (2013) Biomaterials 34:7790, the teachings of which can be adapted for and/or applied to the compositions, systems, described herein.

[0554] For example, US Patent Publication No. 20110023139, the teachings of which can be adapted for and/or applied to the compositions, systems, described herein describes use of zinc finger nucleases to genetically modify cells, animals and proteins associated with cardiovascular disease. Cardiovascular diseases generally include high blood pressure, heart attacks, heart failure, and stroke and TIA. Any chromosomal sequence involved in cardiovascular disease or the protein encoded by any chromosomal sequence involved in cardiovascular disease may be utilized in the methods described in this disclosure. The cardiovascular-related proteins are typically selected based on an experimental association of the cardiovascular-related protein to the development of cardiovascular disease. For example, the production rate or circulating concentration of a cardiovascular-related protein may be elevated or depressed in a population having a cardiovascular disorder relative to a population lacking the cardiovascular disorder. Differences in protein levels may be assessed using proteomic techniques including but not limited to Western blot, immunohistochemical staining, enzyme linked immunosorbent assay (ELISA), and mass spectrometry. Alternatively, the cardiovascular-related proteins may be identified by obtaining gene expression profiles of the genes encoding the proteins using genomic techniques including but not limited to DNA microarray analysis, serial analysis of gene expression (SAGE), and quantitative real-time polymerase chain reaction (Q-PCR).

[0555] The compositions, systems, herein can be used for treating diseases of the muscular system. The present invention also contemplates delivering the composition, system, described herein, effector protein systems, to muscle(s).

[0556] In one embodiment, the muscle disease to be treated is a muscle dystrophy such as DMD. In one embodiment, the composition, system, such as a system capable of RNA modification, described herein can be used to achieve exon skipping to achieve correction of the diseased gene. As used herein, the term “exon skipping” refers to the modification of pre-mRNA splicing by the targeting of splice donor and/or acceptor sites within a pre-mRNA with one or more complementary antisense oligonucleotide(s) (AONs). By blocking access of a spliceosome to one or more splice donor or acceptor site, an AON may prevent a splicing reaction thereby causing the deletion of one or more exons from a fully-processed mRNA. Exon skipping may be achieved in the nucleus during the maturation process of pre-mRNAs. In some examples, exon skipping may include the masking of key sequences involved in the splicing of targeted exons by using a composition, system, described herein capable of RNA modification. In one embodiment, exon skipping can be achieved in dystrophin mRNA. In one embodiment, the composition, system, can induce exon skipping at exon 1, 2, 3, 4, 5, 6, 7, 8, 10, 11, 12, 13, 14, 15, 16, 17, 18, 19, 20, 21, 22, 23, 24, 25, 26, 27, 28, 29, 30, 31, 32, 33, 34, 45, 36, 37, 38, 39, 40, 41, 42, 43, 44, 45, 46, 47, 48, 49, 50, 51, 52, 53, 54, 55, 56, 57, 58, 59, 60, 61, 62, 63, 64, 65, 66, 67, 68, 69, 70, 71, 72, 73, 74, 75, 76, 77, 78, 79, or any combination thereof of the dystrophin mRNA. In one embodiment, the composition, system, can induce exon skipping at exon 43, 44, 50, 51, 52, 55, or any combination thereof of the dystrophin mRNA. Mutations in these exons, can also be corrected using non-exon skipping polynucleotide modification methods.

[0557] In one embodiment, for treatment of a muscle disease, the method of Bortolanza et al. Molecular Therapy vol. 19 no. 11, 2055-264 November 2011) may be applied to an AAV expressing TnpB polypeptide and injected into humans at a dosage of about 2× 1015 or 2×1016 vg of vector. The teachings of Bortolanza et al., can be adapted for and/or applied to the compositions, systems, described herein.

[0558] In one embodiment, the method of Dumonceaux et al. (Molecular Therapy vol. 18 no. 5, 881-887 May 2010) may be applied to an AAV expressing TnpB polypeptide and injected into humans, for example, at a dosage of about 10¹⁴ to about 10¹⁵ vg of vector. The teachings of Dumonceaux described herein can be adapted for and/or applied to the compositions, systems, described herein.

[0559] In one embodiment, the method of Kinouchi et al. (Gene Therapy (2008) 15, 1126-1130) may be applied to compositions described herein and injected into a human, for example, at a dosage of about 500 to 1000 ml of a 40 μM solution into the muscle.

[0560] In one embodiment, the method of Hagstrom et al. (Molecular Therapy Vol. 10, No. 2, August 2004) can be adapted for and/or applied to the compositions, systems, herein and injected at a dose of about 15 to about 50 mg into the great saphenous vein of a human.

[0561] In one embodiment, the method comprises treating a sickle cell related disease, e.g., sickle cell trait, sickle cell disease such as sickle cell anemia, B-thalassaemia. For example, the method and system may be used to modify the genome of the sickle cell, e.g., by correcting one or more mutations of the β-globin gene. In the case of B-thalassaemia, sickle cell anemia can be corrected by modifying HSCs with the systems. The system allows the specific editing of the cell's genome by cutting its DNA and then letting it repair itself. The TnpB polypeptide is inserted and directed by a nucleic acid component molecule to the mutated point and then it cuts the DNA at that point. Simultaneously, a healthy version of the sequence is inserted. This sequence is used by the cell's own repair system to fix the induced cut. In this way, the TnpB polypeptide allows the correction of the mutation in the previously obtained stem cells. The methods and systems may be used to correct HSCs as to sickle cell anemia using a system that targets and corrects the mutation (e.g., with a suitable HDR template that delivers a coding sequence for β-globin, advantageously non-sickling β-globin); specifically, the nucleic acid component molecule can target mutation that give rise to sickle cell anemia, and the HDR can provide coding for proper expression of β-globin. An nucleic acid component molecule that targets the mutation-and-TnpB polypeptide containing particle is contacted with HSCs carrying the mutation. The particle also can contain a suitable HDR template to correct the mutation for proper expression of B-globin; or the HSC can be contacted with a second particle or a vector that contains or delivers the HDR template. The so contacted cells can be administered; and optionally treated/expanded; cf. Cartier. The HDR template can provide for the HSC to express an engineered B-globin gene (e.g., BA-T87Q), or β-globin.

### Treating Diseases of the Liver and Kidney

[0562] In one embodiment, the composition, system, or component thereof described herein can be used to treat a disease of the kidney or liver. Thus, in one embodiment, delivery of the composition or component thereof described herein is to the liver or kidney.

[0563] Delivery strategies to induce cellular uptake of the therapeutic nucleic acid include physical force or vector systems such as viral-, lipid- or complex-based delivery, or nanocarriers. From the initial applications with less possible clinical relevance, when nucleic acids were addressed to renal cells with hydrodynamic high-pressure injection systemically, a wide range of gene therapeutic viral and non-viral carriers have been applied already to target posttranscriptional events in different animal kidney disease models in vivo (Csaba Révész and Péter Hamar (2011). Delivery Methods to Target RNAs in the Kidney, Gene Therapy Applications, Prof. Chunsheng Kang (Ed.), ISBN: 978-953-307-541-9, InTech, Available from: www.intechopen.com/books/gene-therapy-applications/delivery-methods-to-target-ras-inthe-kidney). Delivery methods to the kidney may include those in Yuan et al. (Am J Physiol Renal Physiol 295: F605-F617, 2008). The method of Yuang et al. may be applied to the composition of the present invention contemplating a 1-2 g subcutaneous injection of polypeptide nuclease conjugated with cholesterol to a human for delivery to the kidneys. In one embodiment, the method of Molitoris et al. (J Am Soc Nephrol 20:1754-1764, 2009) can be adapted to the composition and a cumulative dose of 12-20 mg/kg to a human can be used for delivery to the proximal tubule cells of the kidneys. In one embodiment, the methods of Thompson et al. (Nucleic Acid Therapeutics, Volume 22, Number 4, 2012) can be adapted to the compositions and a dose of up to 25 mg/kg can be delivered via i.v. administration. In one embodiment, the method of Shimizu et al. (J Am Soc Nephrol 21:622-633, 2010) can be adapted to the compositions and a dose of about of 10-20 μmol compositions complexed with nanocarriers in about 1-2 liters of a physiologic fluid for i.p. administration can be used.

[0564] Other various delivery vehicles can be used to deliver the composition, system to the kidney such as viral, hydrodynamic, lipid, polymer nanoparticles, aptamers and various combinations thereof (see e.g., Larson et al., Surgery, (August 2007), Vol. 142, No. 2, pp. (262-269); Hamar et al., Proc Natl Acad Sci, (October 2004), Vol. 101, No. 41, pp. (14883-14888); Zheng et al., Am J Pathol, (October 2008), Vol. 173, No. 4, pp. (973-980); Feng et al., Transplantation, (May 2009), Vol. 87, No. 9, pp. (1283-1289); Q. Zhang et al., PloS ONE, (July 2010), Vol. 5, No. 7, e11709, pp. (1-13); Kushibikia et al., J Controlled Release, (July 2005), Vol. 105, No. 3, pp. (318-331); Wang et al., Gene Therapy, (July 2006), Vol. 13, No. 14, pp. (1097-1103); Kobayashi et al., Journal of Pharmacology and Experimental Therapeutics, (February 2004), Vol. 308, No. 2, pp. (688-693); Wolfrum et al., Nature Biotechnology, (September 2007), Vol. 25, No. 10, pp. (1149-1157); Molitoris et al., J Am Soc Nephrol, (August 2009), Vol. 20, No. 8 pp. (1754-1764); Mikhaylova et al., Cancer Gene Therapy, (March 2011), Vol. 16, No. 3, pp. (217-226); Y. Zhang et al., J Am Soc Nephrol, (April 2006), Vol. 17, No. 4, pp. (1090-1101); Singhal et al., Cancer Res, (May 2009), Vol. 69, No. 10, pp. (4244-4251); Malek et al., Toxicology and Applied Pharmacology, (April 2009), Vol. 236, No. 1, pp. (97-108); Shimizu et al., J Am Soc Nephrology, (April 2010), Vol. 21, No. 4, pp. (622-633); Jiang et al., Molecular Pharmaceutics, (May-June 2009), Vol. 6, No. 3, pp. (727-737); Cao et al, J Controlled Release, (June 2010), Vol. 144, No. 2, pp. (203-212); Ninichuk et al., Am J Pathol, (March 2008), Vol. 172, No. 3, pp. (628-637); Purschke et al., Proc Natl Acad Sci, (March 2006), Vol. 103, No. 13, pp. (5173-5178).

[0565] In one embodiment, delivery is to liver cells. In one embodiment, the liver cell is a hepatocyte. Delivery of the composition and system herein may be via viral vectors, especially AAV (and in particular AAV2/6) vectors. These can be administered by intravenous injection. A preferred target for the liver, whether in vitro or in vivo, is the albumin gene. This is a so-called ‘safe harbor” as albumin is expressed at very high levels and so some reduction in the production of albumin following successful gene editing is tolerated. It is also preferred as the high levels of expression seen from the albumin promoter/enhancer allows for useful levels of correct or transgene production (from the inserted recombination template) to be achieved even if only a small fraction of hepatocytes are edited. See sites identified by Wechsler et al. (reported at the 57th Annual Meeting and Exposition of the American Society of Hematology-abstract available online at ash.confex.com/ash/2015/webprogram/Paper86495.html and presented on 6th December 2015) which can be adapted for use with the compositions, systems, herein.

[0566] Exemplary liver and kidney diseases that can be treated and/or prevented are described elsewhere herein.

### Treating Epithelial and Lung Diseases

[0567] In one embodiment, the disease treated or prevented by the composition and system described herein can be a lung or epithelial disease. The compositions and systems described herein can be used for treating epithelial and/or lung diseases. The present invention also contemplates delivering the composition, system, described herein, to one or both lungs.

[0568] In one embodiment, as viral vector can be used to deliver the composition, system, or component thereof to the lungs. In one embodiment, the AAV is an AAV-1, AAV-2, AAV-5, AAV-6, and/or AAV-9 for delivery to the lungs. (see, e.g., Li et al., Molecular Therapy, vol. 17 no. 12, 2067-277 December 2009). In one embodiment, the MOI can vary from 1×10³ to 4×105 vector genomes/cell. In one embodiment, the delivery vector can be an RSV vector as in Zamora et al. (Am J Respir Crit Care Med Vol 183. pp 531-538, 2011. The method of Zamora et al. may be applied to the TnpB system of the present invention and an aerosolized composition, for example with a dosage of 0.6 mg/kg, may be contemplated for the present invention.

[0569] Subjects treated for a lung disease may for example receive pharmaceutically effective amount of aerosolized AAV vector system per lung endobronchially delivered while spontaneously breathing. As such, aerosolized delivery is preferred for AAV delivery in general. An adenovirus or an AAV particle may be used for delivery. Suitable gene constructs, each operably linked to one or more regulatory sequences, may be cloned into the delivery vector. In this instance, the following constructs are provided as examples: Cbh or EF1a promoter for TnpB, U6 or H1 promoter for nucleic acid component molecule). A preferred arrangement is to use a CFTRdelta508 targeting nucleic acid component molecule, a repair template for deltaF508 mutation and a codon optimized composition, with optionally one or more nuclear localization signal or sequence(s) (NLS(s)), e.g., two (2) NLSs.

### Treating Diseases of the Skin

[0570] The compositions and systems described herein can be used for the treatment of skin diseases. The present invention also contemplates delivering the composition and system, described herein, to the skin.

[0571] In one embodiment, delivery to the skin (intradermal delivery) of the composition, system, or component thereof can be via one or more microneedles or microneedle containing device. For example, in one embodiment the device and methods of Hickerson et al. (Molecular Therapy-Nucleic Acids (2013) 2, e129) can be used and/or adapted to deliver the composition, system, described herein, for example, at a dosage of up to 300 μl of 0.1 mg/ml compositions to the skin.

[0572] In one embodiment, the methods and techniques of Leachman et al. (Molecular Therapy, vol. 18 no. 2, 442-446 February 2010) can be used and/or adapted for delivery of a compositions described herein to the skin.

[0573] In one embodiment, the methods and techniques of Zheng et al. (PNAS, Jul. 24, 2012, vol. 109, no. 30, 11975-11980) can be used and/or adapted for nanoparticle delivery of a compositions described herein to the skin. In one embodiment, as dosage of about 25 nM applied in a single application can achieve gene knockdown in the skin.

### Treating Cancer

[0574] The compositions, systems, described herein can be used for the treatment of cancer. The present invention also contemplates delivering the composition, system, described herein, to a cancer cell. Also, as is described elsewhere herein the compositions, systems, can be used to modify an immune cell, such as a CAR or CAR T cell, which can then in turn be used to treat and/or prevent cancer. This is also described in International Patent Publication No. WO 2015/161276, the disclosure of which is hereby incorporated by reference and described herein below.

[0575] Target genes suitable for the treatment or prophylaxis of cancer can include those set forth in Tables 2 and 3. In one embodiment, target genes for cancer treatment and prevention can also include those described in International Patent Publication No. WO 2015/048577 the disclosure of which is hereby incorporated by reference and can be adapted for and/or applied to the composition, system, described herein.

### Adoptive Cell Therapy

[0576] The compositions, systems, and components thereof described herein can be used to modify cells for an adoptive cell therapy. In an aspect of the invention, methods and compositions which involve editing a target nucleic acid sequence, or modulating expression of a target nucleic acid sequence, and applications thereof in connection with cancer immunotherapy are comprehended by adapting the composition, system, of the present invention. In some examples, the compositions, systems, and methods may be used to modify a stem cell (e.g., induced pluripotent cell) to derive modified natural killer cells, gamma delta T cells, and alpha beta T cells, which can be used for the adoptive cell therapy. In certain examples, the compositions, systems, and methods may be used to modify modified natural killer cells, gamma delta T cells, and alpha beta T cells.

[0577] As used herein, “ACT”, “adoptive cell therapy” and “adoptive cell transfer” may be used interchangeably. In one embodiment, Adoptive cell therapy (ACT) can refer to the transfer of cells to a patient with the goal of transferring the functionality and characteristics into the new host by engraftment of the cells (see, e.g., Mettananda et al., Editing an α-globin enhancer in primary human hematopoietic stem cells as a treatment for β-thalassemia, Nat Commun. 2017 Sep. 4; 8(1): 424). As used herein, the term “engraft” or “engraftment” refers to the process of cell incorporation into a tissue of interest in vivo through contact with existing cells of the tissue. Adoptive cell therapy (ACT) can refer to the transfer of cells, most commonly immune-derived cells, back into the same patient or into a new recipient host with the goal of transferring the immunologic functionality and characteristics into the new host. If possible, use of autologous cells helps the recipient by minimizing GVHD issues. The adoptive transfer of autologous tumor infiltrating lymphocytes (TIL) (Zacharakis et al., (2018) Nat Med. 2018 June; 24(6):724-730; Besser et al., (2010) Clin. Cancer Res 16 (9) 2646-55; Dudley et al., (2002) Science 298 (5594): 850-4; and Dudley et al., (2005) Journal of Clinical Oncology 23 (10): 2346-57.) or genetically re-directed peripheral blood mononuclear cells (Johnson et al., (2009) Blood 114 (3): 535 46; and Morgan et al., (2006) Science 314(5796) 126-9) has been used to successfully treat patients with advanced solid tumors, including melanoma, metastatic breast cancer and colorectal carcinoma, as well as patients with CD19-expressing hematologic malignancies (Kalos et al., (2011) Science Translational Medicine 3 (95): 95ra73). In one embodiment, allogenic cells immune cells are transferred (see, e.g., Ren et al., (2017) Clin Cancer Res 23 (9) 2255-2266). As described further herein, allogenic cells can be edited to reduce alloreactivity and prevent graft-versus-host disease. Thus, use of allogenic cells allows for cells to be obtained from healthy donors and prepared for use in patients as opposed to preparing autologous cells from a patient after diagnosis.

[0578] Aspects of the invention involve the adoptive transfer of immune system cells, such as T cells, specific for selected antigens, such as tumor associated antigens or tumor specific neoantigens (see, e.g., Maus et al., 2014, Adoptive Immunotherapy for Cancer or Viruses, Annual Review of Immunology, Vol. 32:189-225; Rosenberg and Restifo, 2015, Adoptive cell transfer as personalized immunotherapy for human cancer, Science Vol. 348 no. 6230 pp. 62-68; Restifo et al., 2015, Adoptive immunotherapy for cancer: harnessing the T cell response. Nat. Rev. Immunol. 12(4): 269-281; and Jenson and Riddell, 2014, Design and implementation of adoptive therapy with chimeric antigen receptor-modified T cells. Immunol Rev. 257(1): 127-144; and Rajasagi et al., 2014, Systematic identification of personal tumor-specific neoantigens in chronic lymphocytic leukemia. Blood. 2014 Jul. 17; 124(3):453-62).

[0579] In one embodiment, an antigen (such as a tumor antigen) to be targeted in adoptive cell therapy (such as particularly CAR or TCR T-cell therapy) of a disease (such as particularly of tumor or cancer) may be selected from a group consisting of: MR1 (see, e.g., Crowther, et al., 2020, Genome-wide CRISPR-Cas9 screening reveals ubiquitous T cell cancer targeting via the monomorphic MHC class I-related protein MR1, Nature Immunology volume 21, pages 178-185), B cell maturation antigen (BCMA) (see, e.g., Friedman et al., Effective Targeting of Multiple BCMA-Expressing Hematological Malignancies by Anti-BCMA CAR T Cells, Hum Gene Ther. 2018 Mar. 8; Berdeja J G, et al. Durable clinical responses in heavily pretreated patients with relapsed/refractory multiple myeloma: updated results from a multicenter study of bb2121 anti-Bcma CAR T cell therapy. Blood. 2017; 130:740; and Mouhieddine and Ghobrial, Immunotherapy in Multiple Myeloma: The Era of CAR T Cell Therapy, Hematologist, May-June 2018, Volume 15, issue 3); PSA (prostate-specific antigen); prostate-specific membrane antigen (PSMA); PSCA (Prostate stem cell antigen); Tyrosine-protein kinase transmembrane receptor ROR1; fibroblast activation protein (FAP); Tumor-associated glycoprotein 72 (TAG72); Carcinoembryonic antigen (CEA); Epithelial cell adhesion molecule (EPCAM); Mesothelin; Human Epidermal growth factor Receptor 2 (ERBB2 (Her2/neu)); Prostase; Prostatic acid phosphatase (PAP); elongation factor 2 mutant (ELF2M); Insulin-like growth factor 1 receptor (IGF-1R); gplOO; BCR-ABL (breakpoint cluster region-Abelson); tyrosinase; New York esophageal squamous cell carcinoma 1 (NY-ESO-1); K-light chain, LAGE (L antigen); MAGE (melanoma antigen); Melanoma-associated antigen 1 (MAGE-A1); MAGE A3; MAGE A6; legumain; Human papillomavirus (HPV) E6; HPV E7; prostein; survivin; PCTA1 (Galectin 8); Melan-A/MART-1; Ras mutant; TRP-1 (tyrosinase related protein 1, or gp75); Tyrosinase-related Protein 2 (TRP2); TRP-2/INT2 (TRP-2/intron 2); RAGE (renal antigen); receptor for advanced glycation end products 1 (RAGE1); Renal ubiquitous 1, 2 (RU1, RU2); intestinal carboxyl esterase (ICE); Heat shock protein 70-2 (HSP70-2) mutant; thyroid stimulating hormone receptor (TSHR); CD123; CD171; CD19; CD20; CD22; CD26; CD30; CD33; CD44v7/8 (cluster of differentiation 44, exons 7/8); CD53; CD92; CD100; CD148; CD150; CD200; CD261; CD262; CD362; CS-1 (CD2 subset 1, CRACC, SLAMF7, CD319, and 19A24); C-type lectin-like molecule-1 (CLL-1); ganglioside GD3 (aNeu5Ac(2-8)aNeu5Ac(2-3)bDGalp(1-4)bDGlcp(1-1)Cer); Tn antigen (Tn Ag); Fms-Like Tyrosine Kinase 3 (FLT3); CD38; CD138; CD44v6; B7H3 (CD276); KIT (CD117); Interleukin-13 receptor subunit alpha-2 (IL-13Ra2); Interleukin 11 receptor alpha (IL-11Ra); prostate stem cell antigen (PSCA); Protease Serine 21 (PRSS21); vascular endothelial growth factor receptor 2 (VEGFR2); Lewis (Y) antigen; CD24; Platelet-derived growth factor receptor beta (PDGFR-beta); stage-specific embryonic antigen-4 (SSEA-4); Mucin 1, cell surface associated (MUC1); mucin 16 (MUC16); epidermal growth factor receptor (EGFR); epidermal growth factor receptor variant III (EGFRvIII); neural cell adhesion molecule (NCAM); carbonic anhydrase IX (CAIX); Proteasome (Prosome, Macropain) Subunit, Beta Type, 9 (LMP2); ephrin type-A receptor 2 (EphA2); Ephrin B2; Fucosyl GM1; sialyl Lewis adhesion molecule (sLe); ganglioside GM3 (aNeu5Ac(2-3)bDGalp(1-4)bDGlcp(1-1)Cer); TGS5; high molecular weight-melanoma-associated antigen (HMWMAA); o-acetyl-GD2 ganglioside (OAcGD2); Folate receptor alpha; Folate receptor beta; tumor endothelial marker 1 (TEM1/CD248); tumor endothelial marker 7-related (TEM7R); claudin 6 (CLDN6); G protein-coupled receptor class C group 5, member D (GPRC5D); chromosome X open reading frame 61 (CXORF61); CD97; CD179a; anaplastic lymphoma kinase (ALK); Polysialic acid; placenta-specific 1 (PLAC1); hexasaccharide portion of globoH glycoceramide (GloboH); mammary gland differentiation antigen (NY-BR-1); uroplakin 2 (UPK2); Hepatitis A virus cellular receptor 1 (HAVCR1); adrenoceptor beta 3 (ADRB3); pannexin 3 (PANX3); G protein-coupled receptor 20 (GPR20); lymphocyte antigen 6 complex, locus K 9 (LY6K); Olfactory receptor 51E2 (OR51E2); TCR Gamma Alternate Reading Frame Protein (TARP); Wilms tumor protein (WT1); ETS translocation-variant gene 6, located on chromosome 12p (ETV6-AML); sperm protein 17 (SPA17); X Antigen Family, Member 1A (XAGE1); angiopoietin-binding cell surface receptor 2 (Tie 2); CT (cancer/testis (antigen)); melanoma cancer testis antigen-1 (MAD-CT-1); melanoma cancer testis antigen-2 (MAD-CT-2); Fos-related antigen 1; p53; p53 mutant; human Telomerase reverse transcriptase (hTERT); sarcoma translocation breakpoints; melanoma inhibitor of apoptosis (ML-IAP); ERG (transmembrane protease, serine 2 (TMPRSS2) ETS fusion gene); N-Acetyl glucosaminyl-transferase V (NA17); paired box protein Pax-3 (PAX3); Androgen receptor; Cyclin B1; Cyclin D1; v-myc avian myelocytomatosis viral oncogene neuroblastoma derived homolog (MYCN); Ras Homolog Family Member C (RhoC); Cytochrome P450 1B1 (CYP1B1); CCCTC-Binding Factor (Zinc Finger Protein)-Like (BORIS); Squamous Cell Carcinoma Antigen Recognized By T Cells-1 or 3 (SART1, SART3); Paired box protein Pax-5 (PAX5); proacrosin binding protein sp32 (OY-TES1); lymphocyte-specific protein tyrosine kinase (LCK); A kinase anchor protein 4 (AKAP-4); synovial sarcoma, X breakpoint-1, -2, -3 or -4 (SSX1, SSX2, SSX3, SSX4); CD79a; CD79b; CD72; Leukocyte-associated immunoglobulin-like receptor 1 (LAIR1); Fc fragment of IgA receptor (FCAR); Leukocyte immunoglobulin-like receptor subfamily A member 2 (LILRA2); CD300 molecule-like family member f (CD300LF); C-type lectin domain family 12 member A (CLEC12A); bone marrow stromal cell antigen 2 (BST2); EGF-like module-containing mucin-like hormone receptor-like 2 (EMR2); lymphocyte antigen 75 (LY75); Glypican-3 (GPC3); Fc receptor-like 5 (FCRL5); mouse double minute 2 homolog (MDM2); livin; alphafetoprotein (AFP); transmembrane activator and CAML Interactor (TACI); B-cell activating factor receptor (BAFF-R); V-Ki-ras2 Kirsten rat sarcoma viral oncogene homolog (KRAS); immunoglobulin lambda-like polypeptide 1 (IGLL1); 707-AP (707 alanine proline); ART-4 (adenocarcinoma antigen recognized by T4 cells); BAGE (B antigen; b-catenin/m, b-catenin/mutated); CAMEL (CTL-recognized antigen on melanoma); CAP1 (carcinoembryonic antigen peptide 1); CASP-8 (caspase-8); CDC27m (cell-division cycle 27 mutated); CDK4/m (cycline-dependent kinase 4 mutated); Cyp-B (cyclophilin B); DAM (differentiation antigen melanoma); EGP-2 (epithelial glycoprotein 2); EGP-40 (epithelial glycoprotein 40); Erbb2, 3, 4 (erythroblastic leukemia viral oncogene homolog-2, -3, 4); FBP (folate binding protein); fAchR (Fetal acetylcholine receptor); G250 (glycoprotein 250); GAGE (G antigen); GnT-V (N-acetylglucosaminyltransferase V); HAGE (helicose antigen); ULA-A (human leukocyte antigen-A); HST2 (human signet ring tumor 2); KIAA0205; KDR (kinase insert domain receptor); LDLR/FUT (low density lipid receptor/GDP L-fucose: b-D-galactosidase 2-a-L fucosyltransferase); LICAM (L1 cell adhesion molecule); MC1R (melanocortin 1 receptor); Myosin/m (myosin mutated); MUM-1, -2, -3 (melanoma ubiquitous mutated 1, 2, 3); NA88-A (NA cDNA clone of patient M88); KG2D (Natural killer group 2, member D) ligands; oncofetal antigen (h5T4); p190 minor bcr-abl (protein of 190KD bcr-abl); Pml/RARa (promyelocytic leukemia/retinoic acid receptor a); PRAME (preferentially expressed antigen of melanoma); SAGE (sarcoma antigen); TEL/AML1 (translocation Ets-family leukemia/acute myeloid leukemia 1); TPI/m (triosephosphate isomerase mutated); CD70; and any combination thereof.

[0580] In one embodiment, an antigen to be targeted in adoptive cell therapy (such as particularly CAR or TCR T-cell therapy) of a disease (such as particularly of tumor or cancer) is a tumor-specific antigen (TSA).

[0581] In one embodiment, an antigen to be targeted in adoptive cell therapy (such as particularly CAR or TCR T-cell therapy) of a disease (such as particularly of tumor or cancer) is a neoantigen.

[0582] In one embodiment, an antigen to be targeted in adoptive cell therapy (such as particularly CAR or TCR T-cell therapy) of a disease (such as particularly of tumor or cancer) is a tumor-associated antigen (TAA).

[0583] In one embodiment, an antigen to be targeted in adoptive cell therapy (such as particularly CAR or TCR T-cell therapy) of a disease (such as particularly of tumor or cancer) is a universal tumor antigen. In certain preferred embodiments, the universal tumor antigen is selected from the group consisting of: a human telomerase reverse transcriptase (hTERT), survivin, mouse double minute 2 homolog (MDM2), cytochrome P450 1B 1 (CYP1B), HER2/neu, Wilms' tumor gene 1 (WT1), livin, alphafetoprotein (AFP), carcinoembryonic antigen (CEA), mucin 16 (MUC16), MUC1, prostate-specific membrane antigen (PSMA), p53, cyclin (DI), and any combinations thereof.

[0584] In one embodiment, an antigen (such as a tumor antigen) to be targeted in adoptive cell therapy (such as particularly CAR or TCR T-cell therapy) of a disease (such as particularly of tumor or cancer) may be selected from a group consisting of: CD19, BCMA, CD70, CLL-1, MAGE A3, MAGE A6, HPV E6, HPV E7, WT1, CD22, CD171, ROR1, MUC16, and SSX2. In certain preferred embodiments, the antigen may be CD19. For example, CD19 may be targeted in hematologic malignancies, such as in lymphomas, more particularly in B-cell lymphomas, such as without limitation in diffuse large B-cell lymphoma, primary mediastinal b-cell lymphoma, transformed follicular lymphoma, marginal zone lymphoma, mantle cell lymphoma, acute lymphoblastic leukemia including adult and pediatric ALL, non-Hodgkin lymphoma, indolent non-Hodgkin lymphoma, or chronic lymphocytic leukemia. For example, BCMA may be targeted in multiple myeloma or plasma cell leukemia (see, e.g., 2018 American Association for Cancer Research (AACR) Annual meeting Poster: Allogeneic Chimeric Antigen Receptor T Cells Targeting B Cell Maturation Antigen). For example, CLL1 may be targeted in acute myeloid leukemia. For example, MAGE A3, MAGE A6, SSX2, and/or KRAS may be targeted in solid tumors. For example, HPV E6 and/or HPV E7 may be targeted in cervical cancer or head and neck cancer. For example, WT1 may be targeted in acute myeloid leukemia (AML), myelodysplastic syndromes (MDS), chronic myeloid leukemia (CML), non-small cell lung cancer, breast, pancreatic, ovarian or colorectal cancers, or mesothelioma. For example, CD22 may be targeted in B cell malignancies, including non-Hodgkin lymphoma, diffuse large B-cell lymphoma, or acute lymphoblastic leukemia. For example, CD171 may be targeted in neuroblastoma, glioblastoma, or lung, pancreatic, or ovarian cancers. For example, ROR1 may be targeted in ROR1-malignancies, including non-small cell lung cancer, triple negative breast cancer, pancreatic cancer, prostate cancer, ALL, chronic lymphocytic leukemia, or mantle cell lymphoma. For example, MUC16 may be targeted in MUC16ecto+ epithelial ovarian, fallopian tube or primary peritoneal cancer. For example, CD70 may be targeted in both hematologic malignancies as well as in solid cancers such as renal cell carcinoma (RCC), gliomas (e.g., GBM), and head and neck cancers (HNSCC). CD70 is expressed in both hematologic malignancies as well as in solid cancers, while its expression in normal tissues is restricted to a subset of lymphoid cell types (see, e.g., 2018 American Association for Cancer Research (AACR) Annual meeting Poster: Allogeneic CRISPR Engineered Anti-CD70 CAR-T Cells Demonstrate Potent Preclinical Activity Against Both Solid and Hematological Cancer Cells).

[0585] Various strategies may for example be employed to genetically modify T cells by altering the specificity of the T cell receptor (TCR) for example by introducing new TCR a and B chains with selected peptide specificity (see U.S. Pat. No. 8,697,854; PCT Patent Publications: WO2003020763, WO2004033685, WO2004044004, WO2005114215, WO2006000830, WO2008038002, WO2008039818, WO2004074322, WO2005113595, WO2006125962, WO2013166321, WO2013039889, WO2014018863, WO2014083173; U.S. Pat. No. 8,088,379).

[0586] As an alternative to, or addition to, TCR modifications, chimeric antigen receptors (CARs) may be used in order to generate immunoresponsive cells, such as T cells, specific for selected targets, such as malignant cells, with a wide variety of receptor chimera constructs having been described (see U.S. Pat. Nos. 5,843,728; 5,851,828; 5,912,170; 6,004,811; 6,284,240; 6,392,013; 6,410,014; 6,753,162; 8,211,422; and, PCT Publication WO 9215322).

[0587] In general, CARs are comprised of an extracellular domain, a transmembrane domain, and an intracellular domain, wherein the extracellular domain comprises an antigen-binding domain that is specific for a predetermined target. While the antigen-binding domain of a CAR is often an antibody or antibody fragment (e.g., a single chain variable fragment, scFv), the binding domain is not particularly limited so long as it results in specific recognition of a target. For example, in one embodiment, the antigen-binding domain may comprise a receptor, such that the CAR is capable of binding to the ligand of the receptor. Alternatively, the antigen-binding domain may comprise a ligand, such that the CAR is capable of binding the endogenous receptor of that ligand.

[0588] The antigen-binding domain of a CAR is generally separated from the transmembrane domain by a hinge or spacer. The spacer is also not particularly limited, and it is designed to provide the CAR with flexibility. For example, a spacer domain may comprise a portion of a human Fc domain, including a portion of the CH3 domain, or the hinge region of any immunoglobulin, such as IgA, IgD, IgE, IgG, or IgM, or variants thereof. Furthermore, the hinge region may be modified so as to prevent off-target binding by FcRs or other potential interfering objects. For example, the hinge may comprise an IgG4 Fc domain with or without a S228P, L235E, and/or N297Q mutation (according to Kabat numbering) in order to decrease binding to FcRs. Additional spacers/hinges include, but are not limited to, CD4, CD8, and CD28 hinge regions.

[0589] The transmembrane domain of a CAR may be derived either from a natural or from a synthetic source. Where the source is natural, the domain may be derived from any membrane bound or transmembrane protein. Transmembrane regions of particular use in this disclosure may be derived from CD8, CD28, CD3, CD45, CD4, CD5, CDS, CD9, CD 16, CD22, CD33, CD37, CD64, CD80, CD86, CD 134, CD137, CD 154, TCR. Alternatively, the transmembrane domain may be synthetic, in which case it will comprise predominantly hydrophobic residues such as leucine and valine. Preferably a triplet of phenylalanine, tryptophan and valine will be found at each end of a synthetic transmembrane domain. Optionally, a short oligo- or polypeptide linker, preferably between 2 and 10 amino acids in length may form the linkage between the transmembrane domain and the cytoplasmic signaling domain of the CAR. A glycine-serine doublet provides a particularly suitable linker.

[0590] Alternative CAR constructs may be characterized as belonging to successive generations. First-generation CARs typically consist of a single-chain variable fragment of an antibody specific for an antigen, for example comprising a VL linked to a VH of a specific antibody, linked by a flexible linker, for example by a CD8α hinge domain and a CD8α transmembrane domain, to the transmembrane and intracellular signaling domains of either CD3 or FcRγ (scFv-CD35 or scFv-FcRγ; see U.S. Pat. Nos. 7,741,465; 5,912,172; 5,906,936). Second-generation CARs incorporate the intracellular domains of one or more costimulatory molecules, such as CD28, OX40 (CD134), or 4-1BB (CD137) within the endodomain (for example scFv-CD28/OX40/4-1BB-CD3ζ; see U.S. Pat. Nos. 8,911,993; 8,916,381; 8,975,071; 9,101,584; 9,102,760; 9,102,761). Third-generation CARs include a combination of costimulatory endodomains, such a CD3-chain, CD97, GDI la-CD18, CD2, ICOS, CD27, CD154, CDS, OX40, 4-1BB, CD2, CD7, LIGHT, LFA-1, NKG2C, B7-H3, CD30, CD40, PD-1, or CD28 signaling domains (for example scFv-CD28-4-1BB-CD3ζ or scFv-CD28-OX40-CD3ζ; see U.S. Pat. Nos. 8,906,682; 8,399,645; 5,686,281; PCT Publication No. WO 2014/134165; PCT Publication No. WO 2012/079000). In one embodiment, the primary signaling domain comprises a functional signaling domain of a protein selected from the group consisting of CD3 zeta, CD3 gamma, CD3 delta, CD3 epsilon, common FcR gamma (FCERIG), FcR beta (Fc Epsilon R1b), CD79a, CD79b, Fc gamma RIIa, DAP10, and DAP12. In certain preferred embodiments, the primary signaling domain comprises a functional signaling domain of CD3ζ or FcRγ. In one embodiment, the one or more costimulatory signaling domains comprise a functional signaling domain of a protein selected, each independently, from the group consisting of: CD27, CD28, 4-1BB (CD137), OX40, CD30, CD40, PD-1, ICOS, lymphocyte function-associated antigen-1 (LFA-1), CD2, CD7, LIGHT, NKG2C, B7-H3, a ligand that specifically binds with CD83, CDS, ICAM-1, GITR, BAFFR, HVEM (LIGHTR), SLAMF7, NKp80 (KLRF1), CD160, CD19, CD4, CD8 alpha, CD8 beta, IL2R beta, IL2R gamma, IL7R alpha, ITGA4, VLA1, CD49a, ITGA4, IA4, CD49D, ITGA6, VLA-6, CD49f, ITGAD, CD11d, ITGAE, CD103, ITGAL, CD11a, LFA-1, ITGAM, CD11b, ITGAX, CD11c, ITGB1, CD29, ITGB2, CD18, ITGB7, TNFR2, TRANCE/RANKL, DNAM1 (CD226), SLAMF4 (CD244, 2B4), CD84, CD96 (Tactile), CEACAM1, CRTAM, Ly9 (CD229), CD160 (BY55), PSGL1, CD100 (SEMA4D), CD69, SLAMF6 (NTB-A, Ly108), SLAM (SLAMF1, CD150, IPO-3), BLAME (SLAMF8), SELPLG (CD162), LTBR, LAT, GADS, SLP-76, PAG/Cbp, NKp44, NKp30, NKp46, and NKG2D. In one embodiment, the one or more costimulatory signaling domains comprise a functional signaling domain of a protein selected, each independently, from the group consisting of: 4-1BB, CD27, and CD28. In one embodiment, a chimeric antigen receptor may have the design as described in U.S. Pat. No. 7,446,190, comprising an intracellular domain of CD3g chain (such as amino acid residues 52-163 of the human CD3 zeta chain, as shown in SEQ ID NO: 14 of U.S. Pat. No. 7,446,190), a signaling region from CD28 and an antigen-binding element (or portion or domain; such as scFv). The CD28 portion, when between the zeta chain portion and the antigen-binding element, may suitably include the transmembrane and signaling domains of CD28 (such as amino acid residues 114-220 of SEQ ID NO: 10, full sequence shown in SEQ ID NO: 6 of U.S. Pat. No. 7,446,190; these can include the following portion of CD28 as set forth in Genbank identifier NM_006139. Alternatively, when the zeta sequence lies between the CD28 sequence and the antigen-binding element, intracellular domain of CD28 can be used alone (such as amino sequence set forth in SEQ ID NO: 9 of U.S. Pat. No. 7,446,190). Hence, certain embodiments employ a CAR comprising (a) a zeta chain portion comprising the intracellular domain of human CD35 chain, (b) a costimulatory signaling region, and (c) an antigen-binding element (or portion or domain), wherein the costimulatory signaling region comprises the amino acid sequence encoded by SEQ ID NO: 6 of U.S. Pat. No. 7,446,190.

[0591] Alternatively, costimulation may be orchestrated by expressing CARs in antigen-specific T cells, chosen so as to be activated and expanded following engagement of their native αβTCR, for example by antigen on professional antigen-presenting cells, with attendant costimulation. In addition, additional engineered receptors may be provided on the immunoresponsive cells, for example to improve targeting of a T-cell attack and/or minimize side effects.

[0592] By means of an example and without limitation, Kochenderfer et al., (2009) J Immunother. 32 (7): 689-702 described anti-CD19 chimeric antigen receptors (CAR). FMC63-28Z CAR contained a single chain variable region moiety (scFv) recognizing CD19 derived from the FMC63 mouse hybridoma (described in Nicholson et al., (1997) Molecular Immunology 34:1157-1165), a portion of the human CD28 molecule, and the intracellular component of the human TCR-2 molecule. FMC63-CD828BBZ CAR contained the FMC63 scFv, the hinge and transmembrane regions of the CD8 molecule, the cytoplasmic portions of CD28 and 4-1BB, and the cytoplasmic component of the TCR-ζ molecule. The exact sequence of the CD28 molecule included in the FMC63-28Z CAR corresponded to Genbank identifier NM_006139; the sequence included all amino acids starting with the amino acid sequence IEVMYPPPY (SEQ ID NO: 2358) and continuing all the way to the carboxy-terminus of the protein. To encode the anti-CD19 scFv component of the vector, the authors designed a DNA sequence which was based on a portion of a previously published CAR (Cooper et al., (2003) Blood 101:1637-1644). This sequence encoded the following components in frame from the 5′ end to the 3′ end: an XhoI site, the human granulocyte-macrophage colony-stimulating factor (GM-CSF) receptor α-chain signal sequence, the FMC63 light chain variable region (as in Nicholson et al., supra), a linker peptide (as in Cooper et al., supra), the FMC63 heavy chain variable region (as in Nicholson et al., supra), and a NotI site. A plasmid encoding this sequence was digested with XhoI and NotI. To form the MSGV-FMC63-28Z retroviral vector, the XhoI and NotI-digested fragment encoding the FMC63 scFv was ligated into a second XhoI and NotI-digested fragment that encoded the MSGV retroviral backbone (as in Hughes et al., (2005) Human Gene Therapy 16:457-472) as well as part of the extracellular portion of human CD28, the entire transmembrane and cytoplasmic portion of human CD28, and the cytoplasmic portion of the human TCR-ζ molecule (as in Maher et al., 2002) Nature Biotechnology 20:70-75). The FMC63-28Z CAR is included in the KTE-C19 (axicabtagene ciloleucel) anti-CD19 CAR-T therapy product in development by Kite Pharma, Inc. for the treatment of inter alia patients with relapsed/refractory aggressive B-cell non-Hodgkin lymphoma (NHL). Accordingly, in one embodiment, cells intended for adoptive cell therapies, more particularly immunoresponsive cells such as T cells, may express the FMC63-28Z CAR as described by Kochenderfer et al. (supra). Hence, in one embodiment, cells intended for adoptive cell therapies, more particularly immunoresponsive cells such as T cells, may comprise a CAR comprising an extracellular antigen-binding element (or portion or domain; such as scFv) that specifically binds to an antigen, an intracellular signaling domain comprising an intracellular domain of a CD3ζ chain, and a costimulatory signaling region comprising a signaling domain of CD28. Preferably, the CD28 amino acid sequence is as set forth in Genbank identifier NM_006139 (sequence version 1, 2 or 3) starting with the amino acid sequence IEVMYPPPY (SEQ ID NO: 64,306) and continuing all the way to the carboxy-terminus of the protein. Preferably, the antigen is CD19, more preferably the antigen-binding element is an anti-CD19 scFv, even more preferably the anti-CD19 scFv as described by Kochenderfer et al. (supra).

[0593] Additional anti-CD19 CARs are further described in International Patent Publication No. WO 2015/187528. More particularly Example 1 and Table 1 of WO2015187528, incorporated by reference herein, demonstrate the generation of anti-CD19 CARs based on a fully human anti-CD19 monoclonal antibody (47G4, as described in US20100104509) and murine anti-CD19 monoclonal antibody (as described in Nicholson et al. and explained above). Various combinations of a signal sequence (human CD8-alpha or GM-CSF receptor), extracellular and transmembrane regions (human CD8-alpha) and intracellular T-cell signaling domains (CD28-CD3; 4-1BB-CD3ζ; CD27-CD3ζ; CD28-CD27-CD3ζ, 4-1BB-CD27-CD3ζ; CD27-4-1BB-CD3ζ; CD28-CD27-FcεRI gamma chain; or CD28-FcεRI gamma chain) were disclosed. Hence, in one embodiment, cells intended for adoptive cell therapies, more particularly immunoresponsive cells such as T cells, may comprise a CAR comprising an extracellular antigen-binding element that specifically binds to an antigen, an extracellular and transmembrane region as set forth in Table 1 of WO2015187528 and an intracellular T-cell signaling domain as set forth in Table 1 of International Application No. WO 2015/187528. Preferably, the antigen is CD19, more preferably the antigen-binding element is an anti-CD19 scFv, even more preferably the mouse or human anti-CD19 scFv as described in Example 1 of WO 2015/187528. In one embodiment, the CAR comprises, consists essentially of or consists of an amino acid sequence of SEQ ID NO: 1, SEQ ID NO: 2, SEQ ID NO: 3, SEQ ID NO: 4, SEQ ID NO: 5, SEQ ID NO: 6, SEQ ID NO: 7, SEQ ID NO: 8, SEQ ID NO: 9, SEQ ID NO: 10, SEQ ID NO: 11, SEQ ID NO: 12, or SEQ ID NO: 13 as set forth in Table 1 of WO2015187528.

[0594] By means of an example and without limitation, chimeric antigen receptor that recognizes the CD70 antigen is described in WO2012058460A2 (see also, Park et al., CD70 as a target for chimeric antigen receptor T cells in head and neck squamous cell carcinoma, Oral Oncol. 2018 March; 78:145-150; and Jin et al., CD70, a novel target of CAR T-cell therapy for gliomas, Neuro Oncol. 2018 Jan. 10; 20(1):55-65). CD70 is expressed by diffuse large B-cell and follicular lymphoma and also by the malignant cells of Hodgkins lymphoma, Waldenstrom's macroglobulinemia and multiple myeloma, and by HTLV-1- and EBV-associated malignancies. (Agathanggelou et al. Am. J. Pathol. 1995; 147:1152-1160; Hunter et al., Blood 2004; 104:4881. 26; Lens et al., J Immunol. 2005; 174:6212-6219; Baba et al., J Virol. 2008; 82:3843-3852.) In addition, CD70 is expressed by non-hematological malignancies such as renal cell carcinoma and glioblastoma. (Junker et al., J Urol. 2005; 173:2150-2153; Chahlavi et al., Cancer Res 2005; 65:5428-5438) Physiologically, CD70 expression is transient and restricted to a subset of highly activated T, B, and dendritic cells.

[0595] By means of an example and without limitation, chimeric antigen receptor that recognizes BCMA has been described (see, e.g., US20160046724A1; WO2016014789A2; WO2017211900A1; WO2015158671A1; US20180085444A1; WO2018028647A1; US20170283504A1; and WO2013154760A1).

[0596] In one embodiment, the immune cell may, in addition to a CAR or exogenous TCR as described herein, further comprise a chimeric inhibitory receptor (inhibitory CAR) that specifically binds to a second target antigen and is capable of inducing an inhibitory or immunosuppressive or repressive signal to the cell upon recognition of the second target antigen. In one embodiment, the chimeric inhibitory receptor comprises an extracellular antigen-binding element (or portion or domain) configured to specifically bind to a target antigen, a transmembrane domain, and an intracellular immunosuppressive or repressive signaling domain. In one embodiment, the second target antigen is an antigen that is not expressed on the surface of a cancer cell or infected cell or the expression of which is downregulated on a cancer cell or an infected cell. In one embodiment, the second target antigen is an MHC-class I molecule. In one embodiment, the intracellular signaling domain comprises a functional signaling portion of an immune checkpoint molecule, such as for example PD-1 or CTLA4. Advantageously, the inclusion of such inhibitory CAR reduces the chance of the engineered immune cells attacking non-target (e.g., non-cancer) tissues.

[0597] Alternatively, T-cells expressing CARs may be further modified to reduce or eliminate expression of endogenous TCRs in order to reduce off-target effects. Reduction or elimination of endogenous TCRs can reduce off-target effects and increase the effectiveness of the T cells (U.S. Pat. No. 9,181,527). T cells stably lacking expression of a functional TCR may be produced using a variety of approaches. T cells internalize, sort, and degrade the entire T cell receptor as a complex, with a half-life of about 10 hours in resting T cells and 3 hours in stimulated T cells (von Essen, M. et al. 2004. J. Immunol. 173:384-393). Proper functioning of the TCR complex requires the proper stoichiometric ratio of the proteins that compose the TCR complex. TCR function also requires two functioning TCR zeta proteins with ITAM motifs. The activation of the TCR upon engagement of its MHC-peptide ligand requires the engagement of several TCRs on the same T cell, which all must signal properly. Thus, if a TCR complex is destabilized with proteins that do not associate properly or cannot signal optimally, the T cell will not become activated sufficiently to begin a cellular response.

[0598] Accordingly, in one embodiment, TCR expression may eliminated using RNA interference (e.g., snucleic acid component, siRNA, miRNA, etc.), TnpB polypeptide, or other methods that target the nucleic acids encoding specific TCRs (e.g., TCR-a and TCR-B) and/or CD3 chains in primary T cells. By blocking expression of one or more of these proteins, the T cell will no longer produce one or more of the key components of the TCR complex, thereby destabilizing the TCR complex and preventing cell surface expression of a functional TCR.

[0599] In some instances, CAR may also comprise a switch mechanism for controlling expression and/or activation of the CAR. For example, a CAR may comprise an extracellular, transmembrane, and intracellular domain, in which the extracellular domain comprises a target-specific binding element that comprises a label, binding domain, or tag that is specific for a molecule other than the target antigen that is expressed on or by a target cell. In such embodiments, the specificity of the CAR is provided by a second construct that comprises a target antigen binding domain (e.g., an scFv or a bispecific antibody that is specific for both the target antigen and the label or tag on the CAR) and a domain that is recognized by or binds to the label, binding domain, or tag on the CAR. See, e.g., WO 2013/044225, WO 2016/000304, WO 2015/057834, WO 2015/057852, WO 2016/070061, U.S. Pat. No. 9,233,125, US 2016/0129109. In this way, a T-cell that expresses the CAR can be administered to a subject, but the CAR cannot bind its target antigen until the second composition comprising an antigen-specific binding domain is administered.

[0600] Alternative switch mechanisms include CARs that require multimerization in order to activate their signaling function (see, e.g., US Patent Publication Nos. US 2015/0368342, US 2016/0175359, US 2015/0368360) and/or an exogenous signal, such as a small molecule drug (US 2016/0166613, Yung et al., Science, 2015), in order to elicit a T-cell response. Some CARs may also comprise a “suicide switch” to induce cell death of the CAR T-cells following treatment (Buddee et al., PLOS One, 2013) or to downregulate expression of the CAR following binding to the target antigen (International Patent Publication No. WO 2016/011210).

[0601] Alternative techniques may be used to transform target immunoresponsive cells, such as protoplast fusion, lipofection, transfection or electroporation. A wide variety of vectors may be used, such as retroviral vectors, lentiviral vectors, adenoviral vectors, adeno-associated viral vectors, plasmids, or transposons, such as a Sleeping Beauty transposon (see U.S. Pat. Nos. 6,489,458; 7,148,203; 7,160,682; 7,985,739; 8,227,432), may be used to introduce CARs, for example using 2nd generation antigen-specific CARs signaling through CD35 and either CD28 or CD137. Viral vectors may for example include vectors based on HIV, SV40, EBV, HSV or BPV.

[0602] Cells that are targeted for transformation may for example include T cells, Natural Killer (NK) cells, cytotoxic T lymphocytes (CTL), regulatory T cells, human embryonic stem cells, tumor-infiltrating lymphocytes (TIL) or a pluripotent stem cell from which lymphoid cells may be differentiated. T cells expressing a desired CAR may for example be selected through co-culture with y-irradiated activating and propagating cells (AaPC), which co-express the cancer antigen and co-stimulatory molecules. The engineered CAR T-cells may be expanded, for example by co-culture on AaPC in presence of soluble factors, such as IL-2 and IL-21. This expansion may for example be carried out so as to provide memory CAR+ T cells (which may for example be assayed by non-enzymatic digital array and/or multi-panel flow cytometry). In this way, CAR T cells may be provided that have specific cytotoxic activity against antigen-bearing tumors (optionally in conjunction with production of desired chemokines such as interferon-γ). CAR T cells of this kind may for example be used in animal models, for example to treat tumor xenografts.

[0603] In one embodiment, ACT includes co-transferring CD4+ Th1 cells and CD8+ CTLs to induce a synergistic antitumor response (see, e.g., Li et al., Adoptive cell therapy with CD4+ T helper 1 cells and CD8+ cytotoxic T cells enhances complete rejection of an established tumor, leading to generation of endogenous memory responses to non-targeted tumor epitopes. Clin Transl Immunology. 2017 October; 6(10): e160).

[0604] In one embodiment, Th17 cells are transferred to a subject in need thereof. Th17 cells have been reported to directly eradicate melanoma tumors in mice to a greater extent than Th1 cells (Muranski P, et al., Tumor-specific Th17-polarized cells eradicate large established melanoma. Blood. 2008 Jul. 15; 112(2): 362-73; and Martin-Orozco N, et al., T helper 17 cells promote cytotoxic T cell activation in tumor immunity. Immunity. 2009 Nov. 20; 31(5): 787-98). Those studies involved an adoptive T cell transfer (ACT) therapy approach, which takes advantage of CD4+ T cells that express a TCR recognizing tyrosinase tumor antigen. Exploitation of the TCR leads to rapid expansion of Th17 populations to large numbers ex vivo for reinfusion into the autologous tumor-bearing hosts.

[0605] In one embodiment, ACT may include autologous iPSC-based vaccines, such as irradiated iPSCs in autologous anti-tumor vaccines (see e.g., Kooreman, Nigel G. et al., Autologous iPSC-Based Vaccines Elicit Anti-tumor Responses In Vivo, Cell Stem Cell 22, 1-13, 2018, doi.org/10.1016/j.stem.2018.01.016).

[0606] Unlike T-cell receptors (TCRs) that are MHC restricted, CARs can potentially bind any cell surface-expressed antigen and can thus be more universally used to treat patients (see Irving et al., Engineering Chimeric Antigen Receptor T-Cells for Racing in Solid Tumors: Don't Forget the Fuel, Front. Immunol., 3 Apr. 2017, doi.org/10.3389/fimmu.2017.00267). In one embodiment, in the absence of endogenous T-cell infiltrate (e.g., due to aberrant antigen processing and presentation), which precludes the use of TIL therapy and immune checkpoint blockade, the transfer of CAR T-cells may be used to treat patients (see, e.g., Hinrichs C S, Rosenberg S A. Exploiting the curative potential of adoptive T-cell therapy for cancer. Immunol Rev (2014) 257(1):56-71. doi:10.1111/imr.12132).

[0607] Approaches such as the foregoing may be adapted to provide methods of treating and/or increasing survival of a subject having a disease, such as a neoplasia, for example by administering an effective amount of an immunoresponsive cell comprising an antigen recognizing receptor that binds a selected antigen, wherein the binding activates the immunoresponsive cell, thereby treating or preventing the disease (such as a neoplasia, a pathogen infection, an autoimmune disorder, or an allogeneic transplant reaction).

[0608] In one embodiment, the treatment can be administered after lymphodepleting pretreatment in the form of chemotherapy (typically a combination of cyclophosphamide and fludarabine) or radiation therapy. Initial studies in ACT had short lived responses and the transferred cells did not persist in vivo for very long (Houot et al., T-cell-based immunotherapy: adoptive cell transfer and checkpoint inhibition. Cancer Immunol Res (2015) 3(10):1115-22; and Kamta et al., Advancing Cancer Therapy with Present and Emerging Immuno-Oncology Approaches. Front. Oncol. (2017) 7:64). Immune suppressor cells like Tregs and MDSCs may attenuate the activity of transferred cells by outcompeting them for the necessary cytokines. Not being bound by a theory lymphodepleting pretreatment may eliminate the suppressor cells allowing the TILs to persist.

[0609] In one embodiment, the treatment can be administrated into patients undergoing an immunosuppressive treatment (e.g., glucocorticoid treatment). The cells, or population of cells, may be made resistant to at least one immunosuppressive agent due to the inactivation of a gene encoding a receptor for such immunosuppressive agent. In one embodiment, the immunosuppressive treatment provides for the selection and expansion of the immunoresponsive T cells within the patient.

[0610] In one embodiment, the treatment can be administered before primary treatment (e.g., surgery or radiation therapy) to shrink a tumor before the primary treatment. In another embodiment, the treatment can be administered after primary treatment to remove any remaining cancer cells.

[0611] In one embodiment, immunometabolic barriers can be targeted therapeutically prior to and/or during ACT to enhance responses to ACT or CAR T-cell therapy and to support endogenous immunity (see, e.g., Irving et al., Engineering Chimeric Antigen Receptor T-Cells for Racing in Solid Tumors: Don't Forget the Fuel, Front. Immunol., 3 Apr. 2017, doi.org/10.3389/fimmu.2017.00267).

[0612] The administration of cells or population of cells, such as immune system cells or cell populations, such as more particularly immunoresponsive cells or cell populations, as disclosed herein may be carried out in any convenient manner, including by aerosol inhalation, injection, ingestion, transfusion, implantation, or transplantation. The cells or population of cells may be administered to a patient subcutaneously, intradermally, intratumorally, intranodally, intramedullary, intramuscularly, intrathecally, by intravenous or intralymphatic injection, or intraperitoneally. In one embodiment, the disclosed CARs may be delivered or administered into a cavity formed by the resection of tumor tissue (i.e., intracavity delivery) or directly into a tumor prior to resection (i.e., intratumoral delivery). In one embodiment, the cell compositions of the present invention are preferably administered by intravenous injection.

[0613] The administration of the cells or population of cells can consist of the administration of 104-10⁹ cells per kg body weight, preferably 105 to 10⁶ cells/kg body weight including all integer values of cell numbers within those ranges. Dosing in CAR T cell therapies may for example involve administration of from 106 to 10⁹ cells/kg, with or without a course of lymphodepletion, for example with cyclophosphamide. The cells or population of cells can be administrated in one or more doses. In another embodiment, the effective amount of cells are administrated as a single dose. In another embodiment, the effective amount of cells are administrated as more than one dose over a period time. Timing of administration is within the judgment of managing physician and depends on the clinical condition of the patient. The cells or population of cells may be obtained from any source, such as a blood bank or a donor. While individual needs vary, determination of optimal ranges of effective amounts of a given cell type for a particular disease or conditions are within the skill of one in the art. An effective amount means an amount which provides a therapeutic or prophylactic benefit. The dosage administrated will be dependent upon the age, health and weight of the recipient, kind of concurrent treatment, if any, frequency of treatment and the nature of the effect desired.

[0614] In another embodiment, the effective amount of cells or composition comprising those cells are administrated parenterally. The administration can be an intravenous administration. The administration can be directly done by injection within a tumor.

[0615] To guard against possible adverse reactions, engineered immunoresponsive cells may be equipped with a transgenic safety switch, in the form of a transgene that renders the cells vulnerable to exposure to a specific signal. For example, the herpes simplex viral thymidine kinase (TK) gene may be used in this way, for example by introduction into allogeneic T lymphocytes used as donor lymphocyte infusions following stem cell transplantation (Greco, et al., Improving the safety of cell therapy with the TK-suicide gene. Front. Pharmacol. 2015; 6:95). In such cells, administration of a nucleoside prodrug such as ganciclovir or acyclovir causes cell death. Alternative safety switch constructs include inducible caspase 9, for example triggered by administration of a small-molecule dimerizer that brings together two nonfunctional icasp9 molecules to form the active enzyme. A wide variety of alternative approaches to implementing cellular proliferation controls have been described (see U.S. Patent Publication No. 20130071414; International Patent Publication WO 2011/146862; International Patent Publication WO 2014/011987; International Patent Publication WO 2013/040371; Zhou et al. BLOOD, 2014, 123/25:3895-3905; Di Stasi et al., The New England Journal of Medicine 2011; 365:1673-1683; Sadelain M, The New England Journal of Medicine 2011; 365:1735-173; Ramos et al., Stem Cells 28(6):1107-15 (2010)).

[0616] In a further refinement of adoptive therapies, genome editing may be used to tailor immunoresponsive cells to alternative implementations, for example providing edited CAR T cells (see Poirot et al., 2015, Multiplex genome edited T-cell manufacturing platform for “off-the-shelf” adoptive T-cell immunotherapies, Cancer Res 75 (18): 3853; Ren et al., 2017, Multiplex genome editing to generate universal CAR T cells resistant to PD1 inhibition, Clin Cancer Res. 2017 May 1; 23(9):2255-2266. doi: 10.1158/1078-0432.CCR-16-1300. Epub 2016 Nov. 4; Qasim et al., 2017, Molecular remission of infant B-ALL after infusion of universal TALEN gene-edited CAR T cells, Sci Transl Med. 2017 Jan. 25; 9(374); Legut, et al., 2018, CRISPR-mediated TCR replacement generates superior anticancer transgenic T cells. Blood, 131(3), 311-322; and Georgiadis et al., Long Terminal Repeat CRISPR-CAR-Coupled “Universal” T Cells Mediate Potent Anti-leukemic Effects, Molecular Therapy, In Press, Corrected Proof, Available online 6 Mar. 2018). Cells may be edited using any CRISPR system and method of use thereof as described herein. The composition and systems may be delivered to an immune cell by any method described herein. In preferred embodiments, cells are edited ex vivo and transferred to a subject in need thereof. Immunoresponsive cells, CAR T cells or any cells used for adoptive cell transfer may be edited. Editing may be performed for example to insert or knock-in an exogenous gene, such as an exogenous gene encoding a CAR or a TCR, at a preselected locus in a cell (e.g., TRAC locus); to eliminate potential alloreactive T-cell receptors (TCR) or to prevent inappropriate pairing between endogenous and exogenous TCR chains, such as to knock-out or knock-down expression of an endogenous TCR in a cell; to disrupt the target of a chemotherapeutic agent in a cell; to block an immune checkpoint, such as to knock-out or knock-down expression of an immune checkpoint protein or receptor in a cell; to knock-out or knock-down expression of other gene or genes in a cell, the reduced expression or lack of expression of which can enhance the efficacy of adoptive therapies using the cell; to knock-out or knock-down expression of an endogenous gene in a cell, said endogenous gene encoding an antigen targeted by an exogenous CAR or TCR; to knock-out or knock-down expression of one or more MHC constituent proteins in a cell; to activate a T cell; to modulate cells such that the cells are resistant to exhaustion or dysfunction; and/or increase the differentiation and/or proliferation of functionally exhausted or dysfunctional CD8+ T-cells (see International Patent Publication Nos. WO 2013/176915, WO 2014/059173, WO 2014/172606, WO 2014/184744, and WO 2014/191128).

[0617] In one embodiment, editing may result in inactivation of a gene. By inactivating a gene, it is intended that the gene of interest is not expressed in a functional protein form. In a particular embodiment, the system specifically catalyzes cleavage in one targeted gene thereby inactivating said targeted gene. The nucleic acid strand breaks caused are commonly repaired through the distinct mechanisms of homologous recombination or non-homologous end joining (NHEJ). However, NHEJ is an imperfect repair process that often results in changes to the DNA sequence at the site of the cleavage. Repair via non-homologous end joining (NHEJ) often results in small insertions or deletions (Indel) and can be used for the creation of specific gene knockouts. Cells in which a cleavage induced mutagenesis event has occurred can be identified and/or selected by well-known methods in the art. In one embodiment, homology directed repair (HDR) is used to concurrently inactivate a gene (e.g., TRAC) and insert an endogenous TCR or CAR into the inactivated locus.

[0618] Hence, in one embodiment, editing of cells, particularly cells intended for adoptive cell therapies, more particularly immunoresponsive cells such as T cells, may be performed to insert or knock-in an exogenous gene, such as an exogenous gene encoding a CAR or a TCR, at a preselected locus in a cell. Conventionally, nucleic acid molecules encoding CARs or TCRs are transfected or transduced to cells using randomly integrating vectors, which, depending on the site of integration, may lead to clonal expansion, oncogenic transformation, variegated transgene expression and/or transcriptional silencing of the transgene. Directing of transgene(s) to a specific locus in a cell can minimize or avoid such risks and advantageously provide for uniform expression of the transgene(s) by the cells. Without limitation, suitable ‘safe harbor’ loci for directed transgene integration include CCR5 or AAVS1. Homology-directed repair (HDR) strategies are known and described elsewhere in this specification allowing to insert transgenes into desired loci (e.g., TRAC locus).

[0619] Further suitable loci for insertion of transgenes, in particular CAR or exogenous TCR transgenes, include without limitation loci comprising genes coding for constituents of endogenous T-cell receptor, such as T-cell receptor alpha locus (TRA) or T-cell receptor beta locus (TRB), for example T-cell receptor alpha constant (TRAC) locus, T-cell receptor beta constant 1 (TRBC1) locus or T-cell receptor beta constant 2 (TRBC1) locus. Advantageously, insertion of a transgene into such locus can simultaneously achieve expression of the transgene, potentially controlled by the endogenous promoter, and knock-out expression of the endogenous TCR. This approach has been exemplified in Eyquem et al., (2017) Nature 543:113-117, wherein the authors used CRISPR/Cas9 gene editing to knock-in a DNA molecule encoding a CD19-specific CAR into the TRAC locus downstream of the endogenous promoter; the CAR-T cells obtained by CRISPR were significantly superior in terms of reduced tonic CAR signaling and exhaustion.

[0620] T cell receptors (TCR) are cell surface receptors that participate in the activation of T cells in response to the presentation of antigen. The TCR is generally made from two chains, a and B, which assemble to form a heterodimer and associates with the CD3-transducing subunits to form the T cell receptor complex present on the cell surface. Each a and B chain of the TCR consists of an immunoglobulin-like N-terminal variable (V) and constant (C) region, a hydrophobic transmembrane domain, and a short cytoplasmic region. As for immunoglobulin molecules, the variable region of the a and B chains are generated by V (D) J recombination, creating a large diversity of antigen specificities within the population of T cells. However, in contrast to immunoglobulins that recognize intact antigen, T cells are activated by processed peptide fragments in association with an MHC molecule, introducing an extra dimension to antigen recognition by T cells, known as MHC restriction. Recognition of MHC disparities between the donor and recipient through the T cell receptor leads to T cell proliferation and the potential development of graft versus host disease (GVHD). The inactivation of TCRα or TCRβ can result in the elimination of the TCR from the surface of T cells preventing recognition of alloantigen and thus GVHD. However, TCR disruption generally results in the elimination of the CD3 signaling component and alters the means of further T cell expansion.

[0621] Hence, in one embodiment, editing of cells, particularly cells intended for adoptive cell therapies, more particularly immunoresponsive cells such as T cells, may be performed to knock-out or knock-down expression of an endogenous TCR in a cell. For example, NHEJ-based or HDR-based gene editing approaches can be employed to disrupt the endogenous TCR alpha and/or beta chain genes. For example, gene editing system or systems, such as TnpB system or systems, can be designed to target a sequence found within the TCR beta chain conserved between the beta 1 and beta 2 constant region genes (TRBC1 and TRBC2) and/or to target the constant region of the TCR alpha chain (TRAC) gene.

[0622] Allogeneic cells are rapidly rejected by the host immune system. It has been demonstrated that, allogeneic leukocytes present in non-irradiated blood products will persist for no more than 5 to 6 days (Boni, Muranski et al. 2008 Blood 1; 112(12):4746-54). Thus, to prevent rejection of allogeneic cells, the host's immune system usually has to be suppressed to some extent. However, in the case of adoptive cell transfer the use of immunosuppressive drugs also have a detrimental effect on the introduced therapeutic T cells. Therefore, to effectively use an adoptive immunotherapy approach in these conditions, the introduced cells would need to be resistant to the immunosuppressive treatment. Thus, in a particular embodiment, the present invention further comprises a step of modifying T cells to make them resistant to an immunosuppressive agent, preferably by inactivating at least one gene encoding a target for an immunosuppressive agent. An immunosuppressive agent is an agent that suppresses immune function by one of several mechanisms of action. An immunosuppressive agent can be, but is not limited to a calcineurin inhibitor, a target of rapamycin, an interleukin-2 receptor α-chain blocker, an inhibitor of inosine monophosphate dehydrogenase, an inhibitor of dihydrofolic acid reductase, a corticosteroid, or an immunosuppressive antimetabolite. The present invention allows conferring immunosuppressive resistance to T cells for immunotherapy by inactivating the target of the immunosuppressive agent in T cells. As non-limiting examples, targets for an immunosuppressive agent can be a receptor for an immunosuppressive agent such as: CD52, glucocorticoid receptor (GR), a FKBP family gene member and a cyclophilin family gene member.

[0623] In one embodiment, editing of cells, particularly cells intended for adoptive cell therapies, more particularly immunoresponsive cells such as T cells, may be performed to block an immune checkpoint, such as to knock-out or knock-down expression of an immune checkpoint protein or receptor in a cell. Immune checkpoints are inhibitory pathways that slow down or stop immune reactions and prevent excessive tissue damage from uncontrolled activity of immune cells. In one embodiment, the immune checkpoint targeted is the programmed death-1 (PD-1 or CD279) gene (PDCD1). In other embodiments, the immune checkpoint targeted is cytotoxic T-lymphocyte-associated antigen (CTLA-4). In additional embodiments, the immune checkpoint targeted is another member of the CD28 and CTLA4 Ig superfamily such as BTLA, LAG3, ICOS, PDL1 or KIR. In further additional embodiments, the immune checkpoint targeted is a member of the TNFR superfamily such as CD40, OX40, CD137, GITR, CD27 or TIM-3.

[0624] Additional immune checkpoints include Src homology 2 domain-containing protein tyrosine phosphatase 1 (SHP-1) (Watson H A, et al., SHP-1: the next checkpoint target for cancer immunotherapy? Biochem Soc Trans. 2016 Apr. 15; 44(2):356-62). SHP-1 is a widely expressed inhibitory protein tyrosine phosphatase (PTP). In T-cells, it is a negative regulator of antigen-dependent activation and proliferation. It is a cytosolic protein, and therefore not amenable to antibody-mediated therapies, but its role in activation and proliferation makes it an attractive target for genetic manipulation in adoptive transfer strategies, such as chimeric antigen receptor (CAR) T cells. Immune checkpoints may also include T cell immunoreceptor with Ig and ITIM domains (TIGIT/Vstm3/WUCAM/VSIG9) and VISTA (Le Mercier I, et al., (2015) Beyond CTLA-4 and PD-1, the generation Z of negative checkpoint regulators. Front. Immunol. 6:418).

[0625] International Patent Publication No. WO 2014/172606 relates to the use of MTI and/or MT2 inhibitors to increase proliferation and/or activity of exhausted CD8+ T-cells and to decrease CD8+ T-cell exhaustion (e.g., decrease functionally exhausted or unresponsive CD8+ immune cells). In one embodiment, metallothioneins are targeted by gene editing in adoptively transferred T cells.

[0626] In one embodiment, targets of gene editing may be at least one targeted locus involved in the expression of an immune checkpoint protein. Such targets may include, but are not limited to CTLA4, PPP2CA, PPP2CB, PTPN6, PTPN22, PDCD1, ICOS (CD278), PDL1, KIR, LAG3, HAVCR2, BTLA, CD160, TIGIT, CD96, CRTAM, LAIR1, SIGLEC7, SIGLEC9, CD244 (2B4), TNFRSF10B, TNFRSF10A, CASP8, CASP10, CASP3, CASP6, CASP7, FADD, FAS, TGFBRII, TGFRBRI, SMAD2, SMAD3, SMAD4, SMAD10, SKI, SKIL, TGIF1, IL10RA, IL10RB, HMOX2, IL6R, IL6ST, EIF2AK4, CSK, PAGI, SITI, FOXP3, PRDM1, BATF, VISTA, GUCY1A2, GUCY1A3, GUCY1B2, GUCY1B3, MT1, MT2, CD40, OX40, CD137, GITR, CD27, SHP-1, TIM-3, CEACAM-1, CEACAM-3, or CEACAM-5. In preferred embodiments, the gene locus involved in the expression of PD-1 or CTLA-4 genes is targeted. In other preferred embodiments, combinations of genes are targeted, such as but not limited to PD-1 and TIGIT.

[0627] By means of an example and without limitation, International Patent Publication No. WO 2016/196388 concerns an engineered T cell comprising (a) a genetically engineered antigen receptor that specifically binds to an antigen, which receptor may be a CAR; and (b) a disrupted gene encoding a PD-L1, an agent for disruption of a gene encoding a PD-L1, and/or disruption of a gene encoding PD-L1, wherein the disruption of the gene may be mediated by a gene editing nuclease, a zinc finger nuclease (ZFN), CRISPR/Cas9 and/or TALEN. WO2015142675 relates to immune effector cells comprising a CAR in combination with an agent (such as the composition or system herein) that increases the efficacy of the immune effector cells in the treatment of cancer, wherein the agent may inhibit an immune inhibitory molecule, such as PDI, PD-L1, CTLA-4, TIM-3, LAG-3, VISTA, BTLA, TIGIT, LAIR1, CD160, 2B4, TGFR beta, CEACAM-1, CEACAM-3, or CEACAM-5. Ren et al., (2017) Clin Cancer Res 23 (9) 2255-2266 performed lentiviral delivery of CAR and electro-transfer of Cas9 mRNA and gRNAs targeting endogenous TCR, β-2 microglobulin (B2M) and PD1 simultaneously, to generate gene-disrupted allogeneic CAR T cells deficient of TCR, HLA class I molecule and PD1.

[0628] In one embodiment, cells may be engineered to express a CAR, wherein expression and/or function of methylcytosine dioxygenase genes (TET1, TET2 and/or TET3) in the cells has been reduced or eliminated, (such as the composition or system herein) (for example, as described in WO201704916).

[0629] In one embodiment, editing of cells, particularly cells intended for adoptive cell therapies, more particularly immunoresponsive cells such as T cells, may be performed to knock-out or knock-down expression of an endogenous gene in a cell, said endogenous gene encoding an antigen targeted by an exogenous CAR or TCR, thereby reducing the likelihood of targeting of the engineered cells. In one embodiment, the targeted antigen may be one or more antigen selected from the group consisting of CD38, CD138, CS-1, CD33, CD26, CD30, CD53, CD92, CD100, CD148, CD150, CD200, CD261, CD262, CD362, human telomerase reverse transcriptase (hTERT), survivin, mouse double minute 2 homolog (MDM2), cytochrome P450 1B1 (CYP1B), HER2/neu, Wilms' tumor gene 1 (WT1), livin, alphafetoprotein (AFP), carcinoembryonic antigen (CEA), mucin 16 (MUC16), MUC1, prostate-specific membrane antigen (PSMA), p53, cyclin (D1), B cell maturation antigen (BCMA), transmembrane activator and CAML Interactor (TACI), and B-cell activating factor receptor (BAFF-R) (for example, as described in International Patent Publication Nos. WO 2016/011210 and WO 2017/011804).

[0630] In one embodiment, editing of cells, particularly cells intended for adoptive cell therapies, more particularly immunoresponsive cells such as T cells, may be performed to knock-out or knock-down expression of one or more MHC constituent proteins, such as one or more HLA proteins and/or beta-2 microglobulin (B2M), in a cell, whereby rejection of non-autologous (e.g., allogeneic) cells by the recipient's immune system can be reduced or avoided. In preferred embodiments, one or more HLA class I proteins, such as HLA-A, B and/or C, and/or B2M may be knocked-out or knocked-down. Preferably, B2M may be knocked-out or knocked-down. By means of an example, Ren et al., (2017) Clin Cancer Res 23 (9) 2255-2266 performed lentiviral delivery of CAR and electro-transfer of Cas mRNA and gRNAs targeting endogenous TCR, B-2 microglobulin (B2M) and PD1 simultaneously, to generate gene-disrupted allogeneic CAR T cells deficient of TCR, HLA class I molecule and PD1.

[0631] In other embodiments, at least two genes are edited. Pairs of genes may include, but are not limited to PD1 and TCRα, PD1 and TCRβ, CTLA-4 and TCRα, CTLA-4 and TCRβ, LAG3 and TCRα, LAG3 and TCRβ, Tim3 and TCRα, Tim3 and TCRβ, BTLA and TCRα, BTLA and TCRβ, BY55 and TCRα, BY55 and TCRβ, TIGIT and TCRα, TIGIT and TCRβ, B7H5 and TCRα, B7H5 and TCRβ, LAIR1 and TCRα, LAIR1 and TCRβ, SIGLEC10 and TCRα, SIGLEC10 and TCRβ, 2B4 and TCRα, 2B4 and TCRβ, B2M and TCRα, B2M and TCRβ.

[0632] In one embodiment, a cell may be multiplied edited (multiplex genome editing) as taught herein to (1) knock-out or knock-down expression of an endogenous TCR (for example, TRBC1, TRBC2 and/or TRAC), (2) knock-out or knock-down expression of an immune checkpoint protein or receptor (for example PD1, PD-L1 and/or CTLA4); and (3) knock-out or knock-down expression of one or more MHC constituent proteins (for example, HLA-A, B and/or C, and/or B2M, preferably B2M).

[0633] Whether prior to or after genetic modification of the T cells, the T cells can be activated and expanded generally using methods as described, for example, in U.S. Pat. Nos. 6,352,694; 6,534,055; 6,905,680; 5,858,358; 6,887,466; 6,905,681; 7,144,575; 7,232,566; 7,175,843; 5,883,223; 6,905,874; 6,797,514; 6,867,041; and 7,572,631. T cells can be expanded in vitro or in vivo.

[0634] Immune cells may be obtained using any method known in the art. In one embodiment, allogenic T cells may be obtained from healthy subjects. In one embodiment T cells that have infiltrated a tumor are isolated. T cells may be removed during surgery. T cells may be isolated after removal of tumor tissue by biopsy. T cells may be isolated by any means known in the art. In one embodiment, T cells are obtained by apheresis. In one embodiment, the method may comprise obtaining a bulk population of T cells from a tumor sample by any suitable method known in the art. For example, a bulk population of T cells can be obtained from a tumor sample by dissociating the tumor sample into a cell suspension from which specific cell populations can be selected. Suitable methods of obtaining a bulk population of T cells may include, but are not limited to, any one or more of mechanically dissociating (e.g., mincing) the tumor, enzymatically dissociating (e.g., digesting) the tumor, and aspiration (e.g., as with a needle).

[0635] The bulk population of T cells obtained from a tumor sample may comprise any suitable type of T cell. Preferably, the bulk population of T cells obtained from a tumor sample comprises tumor infiltrating lymphocytes (TILs).

[0636] The tumor sample may be obtained from any mammal. Unless stated otherwise, as used herein, the term “mammal” refers to any mammal including, but not limited to, mammals of the order Logomorpha, such as rabbits; the order Carnivora, including Felines (cats) and Canines (dogs); the order Artiodactyla, including Bovines (cows) and Swines (pigs); or of the order Perssodactyla, including Equines (horses). The mammals may be non-human primates, e.g., of the order Primates, Ceboids, or Simoids (monkeys) or of the order Anthropoids (humans and apes). In one embodiment, the mammal may be a mammal of the order Rodentia, such as mice and hamsters. Preferably, the mammal is a non-human primate or a human. An especially preferred mammal is the human.

[0637] T cells can be obtained from a number of sources, including peripheral blood mononuclear cells (PBMC), bone marrow, lymph node tissue, spleen tissue, and tumors. In one embodiment of the present invention, T cells can be obtained from a unit of blood collected from a subject using any number of techniques known to the skilled artisan, such as Ficoll separation. In one preferred embodiment, cells from the circulating blood of an individual are obtained by apheresis or leukapheresis. The apheresis product typically contains lymphocytes, including T cells, monocytes, granulocytes, B cells, other nucleated white blood cells, red blood cells, and platelets. In one embodiment, the cells collected by apheresis may be washed to remove the plasma fraction and to place the cells in an appropriate buffer or media for subsequent processing steps. In one embodiment of the invention, the cells are washed with phosphate buffered saline (PBS). In an alternative embodiment, the wash solution lacks calcium and may lack magnesium or may lack many if not all divalent cations. Initial activation steps in the absence of calcium lead to magnified activation. As those of ordinary skill in the art would readily appreciate a washing step may be accomplished by methods known to those in the art, such as by using a semi-automated “flow-through” centrifuge (for example, the Cobe 2991 cell processor) according to the manufacturer's instructions. After washing, the cells may be resuspended in a variety of biocompatible buffers, such as, for example, Ca-free, Mg-free PBS. Alternatively, the undesirable components of the apheresis sample may be removed, and the cells directly resuspended in culture media.

[0638] In another embodiment, T cells are isolated from peripheral blood lymphocytes by lysing the red blood cells and depleting the monocytes, for example, by centrifugation through a PERCOLL™ gradient. A specific subpopulation of T cells, such as CD28+, CD4+, CDC, CD45RA+, and CD45RO+ T cells, can be further isolated by positive or negative selection techniques. For example, in one preferred embodiment, T cells are isolated by incubation with anti-CD3/anti-CD28 (i.e., 3×28)-conjugated beads, such as DYNABEADS® M-450 CD3/CD28 T, or XCYTE DYNABEADS™ for a time period sufficient for positive selection of the desired T cells. In one embodiment, the time period is about 30 minutes. In a further embodiment, the time period ranges from 30 minutes to 36 hours or longer and all integer values there between. In a further embodiment, the time period is at least 1, 2, 3, 4, 5, or 6 hours. In yet another preferred embodiment, the time period is 10 to 24 hours. In one preferred embodiment, the incubation time period is 24 hours. For isolation of T cells from patients with leukemia, use of longer incubation times, such as 24 hours, can increase cell yield. Longer incubation times may be used to isolate T cells in any situation where there are few T cells as compared to other cell types, such in isolating tumor infiltrating lymphocytes (TIL) from tumor tissue or from immunocompromised individuals. Further, use of longer incubation times can increase the efficiency of capture of CD8+ T cells.

[0639] Enrichment of a T cell population by negative selection can be accomplished with a combination of antibodies directed to surface markers unique to the negatively selected cells. A preferred method is cell sorting and/or selection via negative magnetic immunoadherence or flow cytometry that uses a cocktail of monoclonal antibodies directed to cell surface markers present on the cells negatively selected. For example, to enrich for CD4+ cells by negative selection, a monoclonal antibody cocktail typically includes antibodies to CD14, CD20, CD11b, CD16, HLA-DR, and CD8.

[0640] Further, monocyte populations (e.g., CD14+ cells) may be depleted from blood preparations by a variety of methodologies, including anti-CD14 coated beads or columns, or utilization of the phagocytotic activity of these cells to facilitate removal. Accordingly, in one embodiment, the invention uses paramagnetic particles of a size sufficient to be engulfed by phagocytotic monocytes. In one embodiment, the paramagnetic particles are commercially available beads, for example, those produced by Life Technologies under the trade name Dynabeads™ In one embodiment, other non-specific cells are removed by coating the paramagnetic particles with “irrelevant” proteins (e.g., serum proteins or antibodies). Irrelevant proteins and antibodies include those proteins and antibodies or fragments thereof that do not specifically target the T cells to be isolated. In one embodiment, the irrelevant beads include beads coated with sheep anti-mouse antibodies, goat anti-mouse antibodies, and human serum albumin.

[0641] In brief, such depletion of monocytes is performed by preincubating T cells isolated from whole blood, apheresed peripheral blood, or tumors with one or more varieties of irrelevant or non-antibody coupled paramagnetic particles at any amount that allows for removal of monocytes (approximately a 20:1 bead: cell ratio) for about 30 minutes to 2 hours at 22 to 37 degrees C., followed by magnetic removal of cells which have attached to or engulfed the paramagnetic particles. Such separation can be performed using standard methods available in the art. For example, any magnetic separation methodology may be used including a variety of which are commercially available, (e.g., DYNAL® Magnetic Particle Concentrator (DYNAL MPC®)). Assurance of requisite depletion can be monitored by a variety of methodologies known to those of ordinary skill in the art, including flow cytometric analysis of CD14 positive cells, before and after depletion.

[0642] For isolation of a desired population of cells by positive or negative selection, the concentration of cells and surface (e.g., particles such as beads) can be varied. In one embodiment, it may be desirable to significantly decrease the volume in which beads and cells are mixed together (i.e., increase the concentration of cells), to ensure maximum contact of cells and beads. For example, in one embodiment, a concentration of 2 billion cells/ml is used. In one embodiment, a concentration of 1 billion cells/ml is used. In a further embodiment, greater than 100 million cells/ml is used. In a further embodiment, a concentration of cells of 10, 15, 20, 25, 30, 35, 40, 45, or 50 million cells/ml is used. In yet another embodiment, a concentration of cells from 75, 80, 85, 90, 95, or 100 million cells/ml is used. In further embodiments, concentrations of 125 or 150 million cells/ml can be used. Using high concentrations can result in increased cell yield, cell activation, and cell expansion. Further, use of high cell concentrations allows more efficient capture of cells that may weakly express target antigens of interest, such as CD28-negative T cells, or from samples where there are many tumor cells present (i.e., leukemic blood, tumor tissue, etc). Such populations of cells may have therapeutic value and would be desirable to obtain. For example, using high concentration of cells allows more efficient selection of CD8+ T cells that normally have weaker CD28 expression.

[0643] In a related embodiment, it may be desirable to use lower concentrations of cells. By significantly diluting the mixture of T cells and surface (e.g., particles such as beads), interactions between the particles and cells is minimized. This selects for cells that express high amounts of desired antigens to be bound to the particles. For example, CD4+ T cells express higher levels of CD28 and are more efficiently captured than CD8+ T cells in dilute concentrations. In one embodiment, the concentration of cells used is 5×106/ml. In other embodiments, the concentration used can be from about 1×10⁵/ml to 1×106/ml, and any integer value in between.

[0644] T cells can also be frozen. Wishing not to be bound by theory, the freeze and subsequent thaw step provides a more uniform product by removing granulocytes and to some extent monocytes in the cell population. After a washing step to remove plasma and platelets, the cells may be suspended in a freezing solution. While many freezing solutions and parameters are known in the art and will be useful in this context, one method involves using PBS containing 20% DMSO and 8% human serum albumin, or other suitable cell freezing media, the cells then are frozen to −80° C. at a rate of 1° per minute and stored in the vapor phase of a liquid nitrogen storage tank. Other methods of controlled freezing may be used as well as uncontrolled freezing immediately at −20° C. or in liquid nitrogen.

[0645] T cells for use in the present invention may also be antigen-specific T cells. For example, tumor-specific T cells can be used. In one embodiment, antigen-specific T cells can be isolated from a patient of interest, such as a patient afflicted with a cancer or an infectious disease. In one embodiment, neoepitopes are determined for a subject and T cells specific to these antigens are isolated. Antigen-specific cells for use in expansion may also be generated in vitro using any number of methods known in the art, for example, as described in U.S. Patent Publication No. US 20040224402 entitled, Generation and Isolation of Antigen-Specific T Cells, or in U.S. Pat. No. 6,040,177. Antigen-specific cells for use in the present invention may also be generated using any number of methods known in the art, for example, as described in Current Protocols in Immunology, or Current Protocols in Cell Biology, both published by John Wiley & Sons, Inc., Boston, Mass.

[0646] In a related embodiment, it may be desirable to sort or otherwise positively select (e.g., via magnetic selection) the antigen specific cells prior to or following one or two rounds of expansion. Sorting or positively selecting antigen-specific cells can be carried out using peptide-MHC tetramers (Altman, et al., Science. 1996 Oct. 4; 274(5284):94-6). In another embodiment, the adaptable tetramer technology approach is used (Andersen et al., 2012 Nat Protoc. 7:891-902). Tetramers are limited by the need to utilize predicted binding peptides based on prior hypotheses, and the restriction to specific HLAs. Peptide-MHC tetramers can be generated using techniques known in the art and can be made with any MHC molecule of interest and any antigen of interest as described herein. Specific epitopes to be used in this context can be identified using numerous assays known in the art. For example, the ability of a polypeptide to bind to MHC class I may be evaluated indirectly by monitoring the ability to promote incorporation of 125I labeled β2-microglobulin (β2m) into MHC class I/β2m/peptide heterotrimeric complexes (see Parker et al., J. Immunol. 152:163, 1994).

[0647] In one embodiment cells are directly labeled with an epitope-specific reagent for isolation by flow cytometry followed by characterization of phenotype and TCRs. In one embodiment, T cells are isolated by contacting with T cell specific antibodies. Sorting of antigen-specific T cells, or generally any cells of the present invention, can be carried out using any of a variety of commercially available cell sorters, including, but not limited to, MoFlo sorter (DakoCytomation, Fort Collins, Colo.), FACSAria™, FACSArray™, FACSVantage™, BD™ LSR II, and FACSCalibur™ (BD Biosciences, San Jose, Calif.).

[0648] In a preferred embodiment, the method comprises selecting cells that also express CD3. The method may comprise specifically selecting the cells in any suitable manner. Preferably, the selecting is carried out using flow cytometry. The flow cytometry may be carried out using any suitable method known in the art. The flow cytometry may employ any suitable antibodies and stains. Preferably, the antibody is chosen such that it specifically recognizes and binds to the particular biomarker being selected. For example, the specific selection of CD3, CD8, TIM-3, LAG-3, 4-1BB, or PD-1 may be carried out using anti-CD3, anti-CD8, anti-TIM-3, anti-LAG-3, anti-4-1BB, or anti-PD-1 antibodies, respectively. The antibody or antibodies may be conjugated to a bead (e.g., a magnetic bead) or to a fluorochrome. Preferably, the flow cytometry is fluorescence-activated cell sorting (FACS). TCRs expressed on T cells can be selected based on reactivity to autologous tumors. Additionally, T cells that are reactive to tumors can be selected for based on markers using the methods described in patent publication Nos. WO2014133567 and WO2014133568, herein incorporated by reference in their entirety. Additionally, activated T cells can be selected for based on surface expression of CD107a.

[0649] In one embodiment of the invention, the method further comprises expanding the numbers of T cells in the enriched cell population. Such methods are described in U.S. Pat. No. 8,637,307 and is herein incorporated by reference in its entirety. The numbers of T cells may be increased at least about 3-fold (or 4-, 5-, 6-, 7-, 8-, or 9-fold), more preferably at least about 10-fold (or 20-, 30-, 40-, 50-, 60-, 70-, 80-, or 90-fold), more preferably at least about 100-fold, more preferably at least about 1,000-fold, or most preferably at least about 100,000-fold. The numbers of T cells may be expanded using any suitable method known in the art. Exemplary methods of expanding the numbers of cells are described in patent publication No. WO 2003/057171, U.S. Pat. No. 8,034,334, and U.S. Patent Publication No. 2012/0244133, each of which is incorporated herein by reference.

[0650] In one embodiment, ex vivo T cell expansion can be performed by isolation of T cells and subsequent stimulation or activation followed by further expansion. In one embodiment of the invention, the T cells may be stimulated or activated by a single agent. In another embodiment, T cells are stimulated or activated with two agents, one that induces a primary signal and a second that is a co-stimulatory signal. Ligands useful for stimulating a single signal or stimulating a primary signal and an accessory molecule that stimulates a second signal may be used in soluble form. Ligands may be attached to the surface of a cell, to an Engineered Multivalent Signaling Platform (EMSP), or immobilized on a surface. In a preferred embodiment both primary and secondary agents are co-immobilized on a surface, for example a bead or a cell. In one embodiment, the molecule providing the primary activation signal may be a CD3 ligand, and the co-stimulatory molecule may be a CD28 ligand or 4-1BB ligand.

[0651] In one embodiment, T cells comprising a CAR or an exogenous TCR, may be manufactured as described in International Patent Publication No. WO 2015/120096, by a method comprising enriching a population of lymphocytes obtained from a donor subject; stimulating the population of lymphocytes with one or more T-cell stimulating agents to produce a population of activated T cells, wherein the stimulation is performed in a closed system using serum-free culture medium; transducing the population of activated T cells with a viral vector comprising a nucleic acid molecule which encodes the CAR or TCR, using a single cycle transduction to produce a population of transduced T cells, wherein the transduction is performed in a closed system using serum-free culture medium; and expanding the population of transduced T cells for a predetermined time to produce a population of engineered T cells, wherein the expansion is performed in a closed system using serum-free culture medium. In one embodiment, T cells comprising a CAR or an exogenous TCR, may be manufactured as described in WO 2015/120096, by a method comprising: obtaining a population of lymphocytes; stimulating the population of lymphocytes with one or more stimulating agents to produce a population of activated T cells, wherein the stimulation is performed in a closed system using serum-free culture medium; transducing the population of activated T cells with a viral vector comprising a nucleic acid molecule which encodes the CAR or TCR, using at least one cycle transduction to produce a population of transduced T cells, wherein the transduction is performed in a closed system using serum-free culture medium; and expanding the population of transduced T cells to produce a population of engineered T cells, wherein the expansion is performed in a closed system using serum-free culture medium. The predetermined time for expanding the population of transduced T cells may be 3 days. The time from enriching the population of lymphocytes to producing the engineered T cells may be 6 days. The closed system may be a closed bag system. Further provided is population of T cells comprising a CAR or an exogenous TCR obtainable or obtained by said method, and a pharmaceutical composition comprising such cells.

[0652] In one embodiment, T cell maturation or differentiation in vitro may be delayed or inhibited by the method as described in International Patent Publication No. WO 2017/070395, comprising contacting one or more T cells from a subject in need of a T cell therapy with an AKT inhibitor (such as, e.g., one or a combination of two or more AKT inhibitors disclosed in claim 8 of WO2017070395) and at least one of exogenous Interleukin-7 (IL-7) and exogenous Interleukin-15 (IL-15), wherein the resulting T cells exhibit delayed maturation or differentiation, and/or wherein the resulting T cells exhibit improved T cell function (such as, e.g., increased T cell proliferation; increased cytokine production; and/or increased cytolytic activity) relative to a T cell function of a T cell cultured in the absence of an AKT inhibitor.

[0653] In one embodiment, a patient in need of a T cell therapy may be conditioned by a method as described in International Patent Publication No. WO 2016/191756 comprising administering to the patient a dose of cyclophosphamide between 200 mg/m2/day and 2000 mg/m2/day and a dose of fludarabine between 20 mg/m2/day and 900 mg/m2/day.

### Diseases

Genetic Diseases and Diseases with a Genetic and/or Epigenetic Aspect

[0654] The compositions, systems, or components thereof can be used to treat and/or prevent a genetic disease or a disease with a genetic and/or epigenetic aspect. The genes and conditions exemplified herein are not exhaustive. In one embodiment, a method of treating and/or preventing a genetic disease can include administering a composition, system, and/or one or more components thereof to a subject, where the composition, system, and/or one or more components thereof is capable of modifying one or more copies of one or more genes associated with the genetic disease or a disease with a genetic and/or epigenetic aspect in one or more cells of the subject. In one embodiment, modifying one or more copies of one or more genes associated with a genetic disease or a disease with a genetic and/or epigenetic aspect in the subject can eliminate a genetic disease or a symptom thereof in the subject. In one embodiment, modifying one or more copies of one or more genes associated with a genetic disease or a disease with a genetic and/or epigenetic aspect in the subject can decrease the severity of a genetic disease or a symptom thereof in the subject. In one embodiment, the compositions, systems, or components thereof can modify one or more genes or polynucleotides associated with one or more diseases, including genetic diseases and/or those having a genetic aspect and/or epigenetic aspect, including but not limited to, any one or more set forth in Table 4A. It will be appreciated that those diseases and associated genes listed herein are non-exhaustive and non-limiting. Further some genes play roles in the development of multiple diseases.

TABLE 4A
Exemplary Genetic and Other Diseases and Associated Genes

| | Primary Tissues | Additional | |
|---|---|---|---|
| | or System | Tissues/Systems | |
| Disease Name | Affected | Affected | Genes |
| Achondroplasia | Bone and | | fibroblast growth factor receptor 3 |
| | Muscle | | (FGFR3) |
| Achromatopsia | eye | | CNGA3, CNGB3, GNAT2, PDE6C, |
| | | | PDE6H, ACHM2, ACHM3, |
| Acute Renal Injury | kidney | | NFkappaB, AATF, p85alpha, FAS, |
| | | | Apoptosis cascade elements (e.g., |
| | | | FASR, Caspase 2, 3, 4, 6, 7, 8, 9, 10, |
| | | | AKT, TNF alpha, IGF1, IGF1R, |
| | | | RIPK1), p53 |
| Age Related Macular | eye | | Abcr; CCL2; CC2; CP |
| Degeneration | | | (ceruloplasmin); Timp3; cathepsinD; |
| | | | VLDLR, CCR2 |
| AIDS | Immune System | | KIR3DL1, NKAT3, NKB1, AMB11, |
| | | | KIR3DS1, IFNG, CXCL12, SDF1 |
| Albinism (including | Skin, hair, eyes, | | TYR, OCA2, TYRP1, and SLC45A2, |
| oculocutaneous albinism (types | | | SLC24A5 and C10orf11 |
| 1-7) and ocular albinism) | | | |
| Alkaptonuria | Metabolism of | Tissues/organs | HGD |
| | amino acids | where | |
| | | homogentisic | |
| | | acid | |
| | | accumulates, | |
| | | particularly | |
| | | cartilage (joints), | |
| | | heart valves, | |
| | | kidneys | |
| alpha-1 antitrypsin deficiency | Lung | Liver, skin, | SERPINA1, those set forth in |
| (AATD or A1AD) | | vascular system, | WO2017165862, PiZ allele |
| | | kidneys, GI | |
| ALS | CNS | | SOD1; ALS2; ALS3; ALS5; |
| | | | ALS7; STEX; FUS; TARDBP; VEGF |
| | | | (VEGF-a; |
| | | | VEGF-b; VEGF-c); DPP6; NEFH, |
| | | | PTGS1, SLC1A2, TNFRSF10B, |
| | | | PRPH, HSP90AA1, CRIA2, IFNG, |
| | | | AMPA2 S100B, FGF2, AOX1, CS, |
| | | | TXN, RAPHJ1, MAP3K5, NBEAL1, |
| | | | GPX1, ICA1L, RAC1, MAPT, ITPR2, |
| | | | ALS2CR4, GLS, ALS2CR8, CNTFR, |
| | | | ALS2CR11, FOLH1, FAM117B, |
| | | | P4HB, CNTF, SQSTM1, STRADB, |
| | | | NAIP, NLR, YWHAQ, SLC33A1, |
| | | | TRAK2, SCA1, NIF3L1, NIF3, |
| | | | PARD3B, COX8A, CDK15, HECW1, |
| | | | HECT, C2, WW 15, NOS1, MET, |
| | | | SOD2, HSPB1, NEFL, CTSB, ANG, |
| | | | HSPA8, RNase A, VAPB, VAMP, |
| | | | SNCA, alpha HGF, CAT, ACTB, |
| | | | NEFM, TH, BCL2, FAS, CASP3, |
| | | | CLU, SMN1, G6PD, BAX, HSF1, |
| | | | RNF19A, JUN, ALS2CR12, HSPA5, |
| | | | MAPK14, APEX1, TXNRDI, NOS2, |
| | | | TIMP1, CASP9, XIAP, GLG1, EPO, |
| | | | VEGFA, ELN, GDNF, NFE2L2, |
| | | | SLC6A3, HSPA4, APOE, PSMB8, |
| | | | DCTN2, TIMP3, KIFAP3, SLC1A1, |
| | | | SMN2, CCNC, STUB1, ALS2, |
| | | | PRDX6, SYP, CABIN1, CASP1, |
| | | | GART, CDK5, ATXN3, RTN4, |
| | | | C1QB, VEGFC, HTT, PARK7, XDH, |
| | | | GFAP, MAP2, CYCS, FCGR3B, CCS, |
| | | | UBL5, MMP9m SLC18A3, TRPM7, |
| | | | HSPB2, AKT1, DEERL1, CCL2, |
| | | | NGRN, GSR, TPPP3, APAF1, |
| | | | BTBD10, GLUD1, CXCR4, S:C1A3, |
| | | | FLT1, PONI, AR, LIF, ERBB3, |
| | | | :GA:S1, CD44, TP53, TLR3, GRIA1, |
| | | | GAPDH, AMPA, GRIK1, DES, |
| | | | CHAT, FLT4, CHMP2B, BAG1, |
| | | | CRNA COMPONENT4, GSS, BAK1, |
| | | | KDR, GSTP1, OGG1, IL6 |
| Alzheimer's Disease | Brain | | E1; CHIP; UCH; UBB; Tau; LRP; |
| | | | PICALM; CLU; PS1; |
| | | | SORL1; CR1; VLDLR; UBA1; |
| | | | UBA3; CHIP28; AQP1; UCHL1; |
| | | | UCHL3; APP, AAA, CVAP, AD1, |
| | | | APOE, AD2, DCP1, ACE1, MPO, |
| | | | PACIP1, PAXIP1L, PTIP, A2M, |
| | | | BLMH, BMH, PSEN1, AD3, ALAS2, |
| | | | ABCA1, BIN1, BDNF, BTNL8, |
| | | | C1ORF49, CDH4, CHRNB2, |
| | | | CKLFSF2, CLEC4E, CR1L, CSF3R, |
| | | | CST3, CYP2C, DAPK1, ESR1, |
| | | | FCAR, FCGR3B, FFA2, FGA, GAB2, |
| | | | GALP, GAPDHS, GMPB, HP, HTR7, |
| | | | IDE, IF127, IFI6, IFIT2, IL1RN, IL- |
| | | | 1RA, IL8RA, IL8RB, JAG1, KCNJ15, |
| | | | LRP6, MAPT, MARK4, MPHOSPH1, |
| | | | MTHFR, NBN, NCSTN, NIACR2, |
| | | | NMNAT3, NTM, ORM1, P2RY13, |
| | | | PBEF1, PCK1, PICALM, PLAU, |
| | | | PLXNC1, PRNP, PSEN1, PSEN2, |
| | | | PTPRA, RALGPS2, RGSL2, |
| | | | SELENBP1, SLC25A37, SORL1, |
| | | | Mitoferrin-1, TF, TFAM, TNF, |
| | | | TNFRSF10C, UBE1C |
| Amyloidosis | | | APOA1, APP, AAA, CVAP, AD1, |
| | | | GSN, FGA, LYZ, TTR, PALB |
| Amyloid neuropathy | | | TTR, PALB |
| Anemia | Blood | | CDAN1, CDA1, RPS19, DBA, PKLR, |
| | | | PK1, NT5C3, UMPH1, PSN1, RHAG, |
| | | | RH50A, NRAMP2, SPTB, ALAS2, |
| | | | ANH1, ASB, ABCB7, ABC7, ASAT |
| Angelman Syndrome | Nervous system, | | UBE3A |
| | brain | | |
| Attention Deficit Hyperactivity | Brain | | PTCHD1 |
| Disorder (ADHD) | | | |
| Autoimmune lymphoproliferative | Immune system | | TNFRSF6, APT1, FAS, CD95, |
| syndrome | | | ALPS1A |
| Autism, Autism spectrum | Brain | | PTCHD1; Mecp2; BZRAP1; MDGA2; |
| disorders (ASDs), including | | | Sema5A; Neurexin 1; GLO1, RTT, |
| Asperger's and a general | | | PPMX, MRX16, RX79, NLGN3, |
| diagnostic category called | | | NLGN4, KIAA1260, AUTSX2, |
| Pervasive Developmental | | | FMR1, FMR2; FXR1; FXR2; |
| Disorders (PDDs) | | | MGLUR5, ATP10C, CDH10, GRM6, |
| | | | MGLUR6, CDH9, CNTN4, NLGN2, |
| | | | CNTNAP2, SEMA5A, DHCR7, |
| | | | NLGN4X, NLGN4Y, DPP6, NLGN5, |
| | | | EN2, NRCAM, MDGA2, NRXN1, |
| | | | FMR2, AFF2, FOXP2, OR4M2, |
| | | | OXTR, FXR1, FXR2, PAH, |
| | | | GABRA1, PTEN, GABRA5, PTPRZ1, |
| | | | GABRB3, GABRG1, HIRIP3, |
| | | | SEZ6L2, HOXA1, SHANK3, IL6, |
| | | | SHBZRAP1, LAMB1, SLC6A4, |
| | | | SERT, MAPK3, TAS2R1, MAZ, |
| | | | TSC1, MDGA2, TSC2, MECP2, |
| | | | UBE3A, WNT2, see also |
| | | | 20110023145 |
| autosomal dominant polycystic | kidney | liver | PKD1, PKD2 |
| kidney disease (ADPKD) - | | | |
| (includes diseases such as von | | | |
| Hippel-Lindau disease and | | | |
| tubreous sclerosis complex | | | |
| disease) | | | |
| Autosomal Recessive Polycystic | kidney | liver | PKDH1 |
| Kidney Disease (ARPKD) | | | |
| Ataxia-Telangiectasia (a.k.a | Nervous system, | various | ATM |
| Louis Bar syndrome) | immune system | | |
| B-Cell Non-Hodgkin Lymphoma | | | BCL7A, BCL7 |
| Bardet-Biedl syndrome | Eye, | Liver, ear, | ARL6, BBS1, BBS2, BBS4, BBS5, |
| | musculoskeletal | gastrointestinal | BBS7, BBS9, BBS10, BBS12, |
| | system, kidney, | system, brain | CEP290, INPP5E, LZTFL1, MKKS, |
| | reproductive | | MKS1, SDCCAG8, TRIM32, TTC8 |
| | organs | | |
| Bare Lymphocyte Syndrome | blood | | TAPBP, TPSN, TAP2, ABCB3, PSF2, |
| | | | RING11, MHC2TA, C2TA, RFX5, |
| | | | RFXAP, RFX5 |
| Bartter's Syndrome (types I, II, | kidney | | SLC12A1 (type I), KCNJ1 (type II), |
| III, IVA and B, and V) | | | CLCNKB (type III), BSND (type IV |
| | | | A), or both the CLCNKA CLCNKB |
| | | | genes (type IV B), CASR (type V), |
| Becker muscular dystrophy | Muscle | | DMD, BMD, MYF6 |
| Best Disease (Vitelliform | eye | | VMD2 |
| Macular Dystrophy type 2) | | | |
| Bleeding Disorders | blood | | TBXA2R, P2RX1, P2X1 |
| Blue Cone Monochromacy | eye | | OPN1LW, OPNIMW, and LCR |
| Breast Cancer | Breast tissue | | BRCA1, BRCA2, COX-2 |
| Bruton's Disease (aka X-linked | Immune system, | | BTK |
| Agammglobulinemia) | specifically B | | |
| | cells | | |
| Cancers (e.g., lymphoma, chronic | Various | | FAS, BID, CTLA4, PDCD1, CBLB, |
| lymphocytic leukemia (CLL), B | | | PTPN6, TRAC, TRBC, those |
| cell acute lymphocytic leukemia | | | described in WO2015048577 |
| (B-ALL), acute lymphoblastic | | | |
| leukemia, acute myeloid | | | |
| leukemia, non-Hodgkin's | | | |
| lymphoma (NHL), diffuse large | | | |
| cell lymphoma (DLCL), multiple | | | |
| myeloma, renal cell carcinoma | | | |
| (RCC), neuroblastoma, colorectal | | | |
| cancer, breast cancer, ovarian | | | |
| cancer, melanoma, sarcoma, | | | |
| prostate cancer, lung cancer, | | | |
| esophageal cancer, hepatocellular | | | |
| carcinoma, pancreatic cancer, | | | |
| astrocytoma, mesothelioma, head | | | |
| and neck cancer, and | | | |
| medulloblastoma | | | |
| Cardiovascular Diseases | heart | Vascular system | IL1B, XDH, TP53, PTGS, MB, IL4, |
| | | | ANGPT1, ABCGu8, CTSK, PTGIR, |
| | | | KCNJ11, INS, CRP, PDGFRB, |
| | | | CCNA2, PDGFB, KCNJ5, KCNN3, |
| | | | CAPN10, ADRA2B, ABCG5, |
| | | | PRDX2, CPAN5, PARP14, MEX3C, |
| | | | ACE, RNF, IL6, TNF, STN, |
| | | | SERPINE1, ALB, ADIPOQ, APOB, |
| | | | APOE, LEP, MTHFR, APOA1, |
| | | | EDN1, NPPB, NOS3, PPARG, PLAT, |
| | | | PTGS2, CETP, AGTR1, HMGCR, |
| | | | IGF1, SELE, REN, PPARA, PON1, |
| | | | KNG1, CCL2, LPL, VWF, F2, |
| | | | ICAM1, TGFB, NPPA, IL10, EPO, |
| | | | SOD1, VCAM1, IFNG, LPA, MPO, |
| | | | ESR1, MAPK, HP, F3, CST3, COG2, |
| | | | MMP9, SERPINC1, F8, HMOX1, |
| | | | APOC3, IL8, PROL1, CBS, NOS2, |
| | | | TLR4, SELP, ABCA1, AGT, LDLR, |
| | | | GPT, VEGFA, NR3C2, IL18, NOS1, |
| | | | NR3C1, FGB, HGF, IL1A, AKT1, |
| | | | LIPC, HSPD1, MAPK14, SPP1, |
| | | | ITGB3, CAT, UTS2, THBD, F10, CP, |
| | | | TNFRSF11B, EGFR, MMP2, PLG, |
| | | | NPY, RHOD, MAPK8, MYC, FN1, |
| | | | CMA1, PLAU, GNB3, ADRB2, |
| | | | SOD2, F5, VDR, ALOX5, HLA- |
| | | | DRB1, PARP1, CD40LG, PON2, |
| | | | AGER, IRS1, PTGS1, ECE1, F7, |
| | | | IRMN, EPHX2, IGFBP1, MAPK10, |
| | | | FAS, ABCB1, JUN, IGFBP3, CD14, |
| | | | PDE5A, AGTR2, CD40, LCAT, |
| | | | CCR5, MMP1, TIMP1, ADM, |
| | | | DYT10, STAT3, MMP3, ELN, USF1, |
| | | | CFH, HSPA4, MMP12, MME, F2R, |
| | | | SELL, CTSB, ANXA5, ADRB1, |
| | | | CYBA, FGA, GGT1, LIPG, HIF1A, |
| | | | CXCR4, PROC, SCARB1, CD79A, |
| | | | PLTP, ADD1, FGG, SAA1, KCNH2, |
| | | | DPP4, NPR1, VTN, KIAA0101, FOS, |
| | | | TLR2, PPIG, IL1R1, AR, CYP1A1, |
| | | | SERPINA1, MTR, RBP4, APOA4, |
| | | | CDKN2A, FGF2, EDNRB, ITGA2, |
| | | | VLA-2, CABIN1, SHBG, HMGB1, |
| | | | HSP90B2P, CYP3A4, GJA1, CAV1, |
| | | | ESR2, LTA, GDF15, BDNF, |
| | | | CYP2D6, NGF, SP1, TGIF1, SRC, |
| | | | EGF, PIK3CG, HLA-A, KCNQ1, |
| | | | CNR1, FBN1, CHKA, BEST1, |
| | | | CTNNB1, IL2, CD36, PRKAB1, TPO, |
| | | | ALDH7A1, CX3CR1, TH, F9, CH1, |
| | | | TF, HFE, IL17A, PTEN, GSTM1, |
| | | | DMD, GATA4, F13A1, TTR, FABP4, |
| | | | PON3, APOC1, INSR, TNFRSF1B, |
| | | | HTR2A, CSF3, CYP2C9, TXN, |
| | | | CYP11B2, PTH, CSF2, KDR, |
| | | | PLA2G2A, THBS1, GCG, RHOA, |
| | | | ALDH2, TCF7L2, NFE2L2, |
| | | | NOTCH1, UGT1A1, IFNA1, PPARD, |
| | | | SIRT1, GNHR1, PAPPA, ARR3, |
| | | | NPPC, AHSP, PTK2, IL13, MTOR, |
| | | | ITGB2, GSTT1, IL6ST, CPB2, |
| | | | CYP1A2, HNF4A, SLC64A, |
| | | | PLA2G6, TNFSF11, SLC8A1, F2RL1, |
| | | | AKR1A1, ALDH9A1, BGLAP, |
| | | | MTTP, MTRR, SULT1A3, RAGE, |
| | | | C4B, P2RY12, RNLS, CREB1, |
| | | | POMC, RAC1, LMNA, CD59, |
| | | | SCM5A, CYP1B1, MIF, MMP13, |
| | | | TIMP2, CYP19A1, CUP21A2, |
| | | | PTPN22, MYH14, MBL2, SELPLG, |
| | | | AOC3, CTSL1, PCNA, IGF2, ITGB1, |
| | | | CAST, CXCL12, IGHE, KCNE1, |
| | | | TFRC, COL1A1, COL1A2, IL2RB, |
| | | | PLA2G10, ANGPT2, PROCR, NOX4, |
| | | | HAMP, PTPN11, SLCA1, IL2RA, |
| | | | CCL5, IRF1, CF:AR, CA:CA, EIF4E, |
| | | | GSTP1, JAK2, CYP3A5, HSPG2, |
| | | | CCL3, MYD88, VIP, SOAT1, |
| | | | ADRBK1, NR4A2, MMP8, NPR2, |
| | | | GCH1, EPRS, PPARGC1A, F12, |
| | | | PECAM1, CCL4, CERPINA34, |
| | | | CASR, FABP2, TTF2, PROS1, CTF1, |
| | | | SGCB, YME1L1, CAMP, ZC3H12A, |
| | | | AKR1B1, MMP7, AHR, CSF1, |
| | | | HDAC9, CTGF, KCNMA1, UGT1A, |
| | | | PRKCA, COMT, S100B, EGR1, PRL, |
| | | | IL15, DRD4, CAMK2G, SLC22A2, |
| | | | CCL11, PGF, THPO, GP6, TACR1, |
| | | | NTS, HNF1A, SST, KCDN1, |
| | | | LOC646627, TBXAS1, CUP2J2, |
| | | | TBXA2R, ADH1C, ALOX12, AHSG, |
| | | | BHMT, GJA4, SLC25A4, ACLY, |
| | | | ALOX5AP, NUMA1, CYP27B1, |
| | | | CYSLTR2, SOD3, LTC4S, UCN, |
| | | | GHRL, APOC2, CLEC4A, |
| | | | KBTBD10, TNC, TYMS, SHC1, |
| | | | LRP1, SOCS3, ADH1B, KLK3, |
| | | | HSD11B1, VKORC1, SERPINB2, |
| | | | TNS1, RNF19A, EPOR, ITGAM, |
| | | | PITX2, MAPK7, FCGR3A, LEEPR, |
| | | | ENG, GPX1, GOT2, HRH1, NR112, |
| | | | CRH, HTR1A, VDAC1, HPSE, |
| | | | SFTPD, TAP2, RMF123, PTK2Bm |
| | | | NTRK2, IL6R, ACHE, GLP1R, GHR, |
| | | | GSR, NQO1, NR5A1, GJB2, |
| | | | SLC9A1, MAOA, PCSK9, FCGR2A, |
| | | | SERPINF1, EDN3, UCP2, TFAP2A, |
| | | | C4BPA, SERPINF2, TYMP, ALPP, |
| | | | CXCR2, SLC3A3, ABCG2, ADA, |
| | | | JAK3, HSPA1A, FASN, FGF1, F11, |
| | | | ATP7A, CR1, GFPA, ROCK1, |
| | | | MECP2, MYLK, BCHE, LIPE, |
| | | | ADORA1, WRN, CXCR3, CD81, |
| | | | SMAD7, LAMC2, MAP3K5, CHGA, |
| | | | LAPP, RHO, ENPP1, PTHLH, NRG1, |
| | | | VEGFC, ENPEP, CEBPB, NAGLU,. |
| | | | F2RL3, CX3CL1, BDKRB1, |
| | | | ADAMTS13, ELANE, ENPP2, CISH, |
| | | | GAST, MYOC, ATP1A2, NF1, GJB1, |
| | | | MEF2A, VCL, BMPR2, TUBB, |
| | | | CDC42, KRT18, HSF1, MYB, |
| | | | PRKAA2, ROCK2, TFP1, PRKG1, |
| | | | BMP2, CTNND1, CTH, CTSS, |
| | | | VAV2, NPY2R, IGFBP2, CD28, |
| | | | GSTA1, PPIA, APOH, S100A8, IL11, |
| | | | ALOX15, FBLN1, NR1H3, SCD, GIP, |
| | | | CHGB, PRKCB, SRD5A1, HSD11B2, |
| | | | CALCRL, GALNT2, ANGPTL4, |
| | | | KCNN4, PIK3C2A, HBEGF, |
| | | | CYP7A1, HLA-DRB5, BNIP3, |
| | | | GCKR, S100A12, PADI4, HSPA14, |
| | | | CXCR1, H19, KRTAP19-3, IDDM2, |
| | | | RAC2, YRY1, CLOCK, NGFR, DBH, |
| | | | CRNA COMPONENT4, CACNA1C, |
| | | | PRKAG2, CHAT, PTGDS, NR1H2, |
| | | | TEK, VEGFB, MEF2C, MAPKAPK2, |
| | | | TNFRSF11A, HSPA9, CYSLTR1, |
| | | | MAT1A, OPRL1, IMPA1, CLCN2, |
| | | | DLD, PSMA6, PSMB8, CHI3L1, |
| | | | ALDH1B1, PARP2, STAR, LBP, |
| | | | ABCC6, RGS2, EFNB2, GJB6, |
| | | | APOA2, AMPD1, DYSF, |
| | | | FDFT1, EMD2, CCR6, GJB3, IL1RL1, |
| | | | ENTPD1, BBS4, CELSR2, F11R, |
| | | | RAPGEF3, HYAL1, ZNF259, |
| | | | ATOX1, ATF6, KHK, SAT1, GGH, |
| | | | TIMP4, SLC4A4, PDE2A, PDE3B, |
| | | | FADS1, FADS2, TMSB4X, TXNIP, |
| | | | LIMS1, RHOB, LY96, FOXO1, |
| | | | PNPLA2, TRH, GJC1, S:C17A5, FTO, |
| | | | GJD2, PRSC1, CASP12, GPBAR1, |
| | | | PXK, IL33, TRIB1, PBX4, NUPR1, |
| | | | 15-SEP, CILP2, TERC, GGT2, |
| | | | MTCO1, UOX, AVP |
| Cataract | eye | | CRYAA, CRYA1, CRYBB2, CRYB2, |
| | | | PITX3, BFSP2, CP49, CP47, CRYAA, |
| | | | CRYA1, PAX6, AN2, MGDA, |
| | | | CRYBA1, CRYB1, CRYGC, CRYG3, |
| | | | CCL, LIM2, MP19, CRYGD, CRYG4, |
| | | | BFSP2, CP49, CP47, HSF4, CTM, |
| | | | HSF4, CTM, MIP, AQP0, CRYAB, |
| | | | CRYA2, CTPP2, CRYBB1, CRYGD, |
| | | | CRYG4, CRYBB2, CRYB2, CRYGC, |
| | | | CRYG3, CCL, CRYAA, CRYA1, |
| | | | GJA8, CX50, CAE1, GJA3, CX46, |
| | | | CZP3, CAE3, CCM1, CAM, KRIT1 |
| CDKL-5 Deficiencies or | Brain, CNS | | CDKL5 |
| Mediated Diseases | | | |
| Charcot-Marie-Tooth (CMT) | Nervous system | Muscles | PMP22 (CMT1A and E), MPZ |
| disease (Types 1, 2, 3, 4,) | | (dystrophy) | (CMT1B), LITAF (CMT1C), EGR2 |
| | | | (CMT1D), NEFL (CMT1F), GJB1 |
| | | | (CMT1X), MFN2 (CMT2A), KIF1B |
| | | | (CMT2A2B), RAB7A (CMT2B), |
| | | | TRPV4 (CMT2C), GARS (CMT2D), |
| | | | NEFL (CMT2E), GAPD1 (CMT2K), |
| | | | HSPB8 (CMT2L), DYNC1H1, |
| | | | CMT2O), LRSAM1 (CMT2P), |
| | | | IGHMBP2 (CMT2S), MORC2 |
| | | | (CMT2Z), GDAP1 (CMT4A), |
| | | | MTMR2 or SBF2/MTMR13 |
| | | | (CMT4B), SH3TC2 (CMT4C), |
| | | | NDRG1 (CMT4D), PRX (CMT4F), |
| | | | FIG, 4 (CMT4J), NT-3 |
| Chédiak-Higashi Syndrome | Immune system | Skin, hair, eyes, | LYST |
| | | neurons | |
| Choroidermia | | | CHM, REP1, |
| Chorioretinal atrophy | eye | | PRDM13, RGR, TEAD1 |
| Chronic Granulomatous Disease | Immune system | | CYBA, CYBB, NCF1, NCF2, NCF4 |
| Chronic Mucocutaneous | Immune system | | AIRE, CARD9, CLEC7A IL12B, |
| Candidiasis | | | IL12B1, IL1F, IL17RA, IL17RC, |
| | | | RORC, STAT1, STAT3, TRAF31P2 |
| Cirrhosis | liver | | KRT18, KRT8, CIRH1A, NAIC, |
| | | | TEX292, KIAA1988 |
| Colon cancer (Familial | Gastrointestinal | | FAP: APC HNPCC: MSH2, |
| adenomatous polyposis (FAP) | | | MLH1, PMS2, SH6, PMS1 |
| and hereditary nonpolyposis | | | |
| colon cancer (HNPCC)) | | | |
| Combined Immunodeficiency | Immune System | | IL2RG, SCIDX1, SCIDX, IMD4); |
| | | | HIV-1 (CCL5, SCYA5, D17S136E, |
| | | | TCP228 |
| Cone(-rod) dystrophy | eye | | AIPL1, CRX, GUA1A, GUCY2D, |
| | | | PITPM3, PROM1, PRPH2, RIMS1, |
| | | | SEMA4A, ABCA4, ADAM9, ATF6, |
| | | | C21ORF2, C8ORF37, CACNA2D4, |
| | | | CDHR1, CERKL, CNGA3, CNGB3, |
| | | | CNNM4, CNAT2, IFT81, KCNV2, |
| | | | PDE6C, PDE6H, POC1B, RAX2, |
| | | | RDH5, RPGRIP1, TTLL5, RetCG1, |
| | | | GUCY2E |
| Congenital Stationary Night | eye | | CABP4, CACNA1F, CACNA2D4, |
| Blindness | | | GNAT1, CPR179, GRK1, GRM6, |
| | | | LRIT3, NYX, PDE6B, RDH5, RHO, |
| | | | RLBP1, RPE65, SAG, SLC24A1, |
| | | | TRPM1, |
| Congenital Fructose Intolerance | Metabolism | | ALDOB |
| Cori's Disease (Glycogen Storage | Various- | | AGL |
| Disease Type III) | wherever | | |
| | glycogen | | |
| | accumulates, | | |
| | particularly | | |
| | liver, heart, | | |
| | skeletal muscle | | |
| Corneal clouding and dystrophy | eye | | APOA1, TGFBI, CSD2, CDGG1, |
| | | | CSD, BIGH3, CDG2, TACSTD2, |
| | | | TROP2, M1S1, VSX1, RINX, PPCD, |
| | | | PPD, KTCN, COL8A2, FECD, |
| | | | PPCD2, PIP5K3, CFD |
| Cornea plana congenital | | | KERA, CNA2 |
| Cri du chat Syndrome, also | | | Deletions involving only band 5p15.2 |
| known as 5p syndrome and cat | | | to the entire short arm of chromosome |
| cry syndrome | | | 5, e.g., CTNND2, TERT, |
| Cystic Fibrosis (CF) | Lungs and | Pancreas, liver, | CTFR, ABCC7, CF, MRP7, SCNN1A, |
| | respiratory | digestive | those described in WO2015157070 |
| | system | system, | |
| | | reproductive | |
| | | system, | |
| | | exocrine, glands, | |
| Diabetic nephropathy | kidney | | Gremlin, 12/15- lipoxygenase, TIM44, |
| Dent Disease (Types 1 and 2) | Kidney | | Type 1: CLCN5, Type 2: ORCL |
| Dentatorubro-Pallidoluysian | CNS, brain, | | Atrophin-1 and Atn1 |
| Atrophy (DRPLA) (aka Haw | muscle | | |
| River and Naito-Oyanagi | | | |
| Disease) | | | |
| Down Syndrome | various | | Chromosome 21 trisomy |
| Drug Addiction | Brain | | Prkce; Drd2; Drd4; ABAT; |
| | | | GRIA2; Grm5; Grin1: Htr1b; Grin2a; |
| | | | Drd3; Pdyn; Gria1 |
| Duane syndrome (Types 1, 2, and | eye | | CHN1, indels on chromosomes 4 and 8 |
| 3, including subgroups A, B and | | | |
| C). Other names for this | | | |
| condition include: Duane's | | | |
| Retraction Syndrome (or DR | | | |
| syndrome), Eye Retraction | | | |
| Syndrome, Retraction Syndrome, | | | |
| Congenital retraction syndrome | | | |
| and Stilling-Turk-Duane | | | |
| Syndrome | | | |
| Duchenne muscular dystrophy | muscle | Cardiovascular, | DMD, BMD, dystrophin gene, intron |
| (DMD) | | respiratory | flanking exon 51 of DMD gene, exon |
| | | | 51 mutations in DMD gene, see also |
| | | | WO2013163628 and US Pat. Pub. |
| | | | 20130145487 |
| Edward's Syndrome | | | Complete or partial trisomy of |
| (Trisomy 18) | | | chromosome 18 |
| Ehlers-Danlos Syndrome (Types | Various | | COL5A1, COL5A2, COL1A1, |
| I-VI) | depending on | | COL3A1, TNXB, PLOD1, COL1A2, |
| | type: including | | FKBP14 and ADAMTS2 |
| | musculoskeletal, | | |
| | eye, vasculature, | | |
| | immune, and | | |
| | skin | | |
| Emery-Dreifuss muscular | muscle | | LMNA, LMN1, EMD2, FPLD, |
| dystrophy | | | CMD1A, HGPS, LGMD1B, LMNA, |
| | | | LMN1, EMD2, FPLD, CMD1A |
| Enhanced S-Cone Syndrome | eye | | NR2E3, NRL |
| Fabry's Disease | Various - | | GLA |
| | including skin, | | |
| | eyes, and | | |
| | gastrointestinal | | |
| | system, kidney, | | |
| | heart, brain, | | |
| | nervous system | | |
| Facioscapulohumeral muscular | muscles | | FSHMD1A, FSHD1A, FRG1, |
| dystrophy | | | |
| Factor H and Factor H-like 1 | blood | | HF1, CFH, HUS |
| Factor V Leiden thrombophilia | blood | | Factor V (F5) |
| and Factor V deficiency | | | |
| Factor V and Factor VII | blood | | MCFD2 |
| deficiency | | | |
| Factor VII deficiency | blood | | F7 |
| Factor X deficiency | blood | | F10 |
| Factor XI deficiency | blood | | F11 |
| Factor XII deficiency | blood | | F12, HAF |
| Factor XIIIA deficiency | blood | | F13A1, F13A |
| Factor XIIIB deficiency | blood | | F13B |
| Familial Hypercholestereolemia | Cardiovascular | | APOB, LDLR, PCSK9 |
| | system | | |
| Familial Mediterranean Fever | Various- | Heart, kidney, | MEFV |
| (FMF) also called recurrent | organs/tissues | brain/CNS, | |
| polyserositis or familial | with serous or | reproductive | |
| paroxysmal polyserositis | synovial | organs | |
| | membranes, | | |
| | skin, joints | | |
| Fanconi Anemia | Various - blood | | FANCA, FACA, FA1, FA, FAA, |
| | (anemia), | | FAAP95, FAAP90, FLJ34064, |
| | immune system, | | FANCC, FANCG, RAD51, BRCA1, |
| | cognitive, | | BRCA2, BRIP1, BACH1, FANCJ, |
| | kidneys, eyes, | | FANCB, FANCD1, FANCD2, |
| | musculoskeletal | | FANCD, FAD, FANCE, FACE, |
| | | | FANCF, FANCI, ERCC4, FANCL, |
| | | | FANCM, PALB2, RAD51C, SLX4, |
| | | | UBE2T, FANCB, XRCC9, PHF9, |
| | | | KIAA1596 |
| Fanconi Syndrome Types I | kidneys | | FRTS1, GATM |
| (Childhood onset) and II (Adult | | | |
| Onset) | | | |
| Fragile X syndrome and related | brain | | FMR1, FMR2; FXR1; FXR2; |
| disorders | | | mGLUR5 |
| Fragile XE Mental Retardation | Brain, nervous | | FMR1 |
| (aka Martin Bell syndrome) | system | | |
| Friedreich Ataxia (FRDA) | Brain, nervous | heart | FXN/X25 |
| | system | | |
| Fuchs endothelial corneal | Eye | | TCF4; COL8A2 |
| dystrophy | | | |
| Galactosemia | Carbohydrate | Various-where | GALT, GALK1, and GALE |
| | metabolism | galactose | |
| | disorder | accumulates - | |
| | | liver, brain, eyes | |
| Gastrointestinal Epithelial | | | CISH |
| Cancer, GI cancer | | | |
| Gaucher Disease (Types 1, 2, and | Fat metabolism | Various-liver, | GBA |
| 3, as well as other unusual forms | disorder | spleen, blood, | |
| that may not fit into these types) | | CNS, skeletal | |
| | | system | |
| Griscelli syndrome | | | |
| Glaucoma | eye | | MYOC, TIGR, GLC1A, JOAG, |
| | | | GPOA, OPTN, GLC1E, FIP2, HYPL, |
| | | | NRP, CYP1B1, GLC3A, OPA1, NTG, |
| | | | NPG, CYP1B1, GLC3A, those |
| | | | described in WO2015153780 |
| Glomerulo sclerosis | kidney | | CC chemokine ligand 2 |
| Glycogen Storage Diseases | Metabolism | | SLC2A2, GLUT2, G6PC, G6PT, |
| Types I-VI -See also Cori's | Diseases | | G6PT1, GAA, LAMP2, LAMPB, |
| Disease, Pompe's Disease, | | | AGL, GDE, GBE1, GYS2, PYGL, |
| McArdle's disease, Hers Disease, | | | PFKM, see also Cori's Disease, |
| and Von Gierke's disease | | | Pompe's Disease, McArdle's disease, |
| | | | Hers Disease, and Von Gierke's |
| | | | disease |
| RBC Glycolytic enzyme | blood | | any mutations in a gene for an enzyme |
| deficiency | | | in the glycolysis pathway including |
| | | | mutations in genes for hexokinases I |
| | | | and II, glucokinase, phosphoglucose |
| | | | isomerase, phosphofructokinase, |
| | | | aldolase Bm triosephosphate |
| | | | isomerease, glyceraldehydee-3- |
| | | | phosphate dehydrogenase, |
| | | | phosphoglycerokinase, |
| | | | phosphoglycerate mutase, enolase I, |
| | | | pyruvate kinase |
| Hartnup's disease | Malabsorption | Various- brain, | SLC6A19 |
| | disease | gastrointestinal, | |
| | | skin, | |
| Hearing Loss | ear | | NOX3, Hes5, BDNF, |
| Hemochromatosis (HH) | Iron absorption | Various- | HFE and H63D |
| | regulation | wherever iron | |
| | disease | accumulates, | |
| | | liver, heart, | |
| | | pancreas, joints, | |
| | | pituitary gland | |
| Hemophagocytic | blood | | PRF1, HPLH2, UNC13D, MUNC13- |
| lymphohistiocytosis disorders | | | 4, HPLH3, HLH3, FHL3 |
| Hemorrhagic disorders | blood | | PI, ATT, F5 |
| Hers disease (Glycogen storage | liver | muscle | PYGL |
| disease Type VI) | | | |
| Hereditary angioedema (HAE) | | | kalikrein B1 |
| Hereditary Hemorrhagic | Skin and | | ACVRL1, ENG and SMAD4 |
| Telangiectasia (Osler-Weber- | mucous | | |
| Rendu Syndrome) | membranes | | |
| Hereditary Spherocytosis | blood | | NK1, EPB42, SLC4A1, SPTA1, and |
| | | | SPTB |
| Hereditary Persistence of Fetal | blood | | HBG1, HBG2, BCL11A, promoter |
| Hemoglobin | | | region of HBG 1 and/or 2 (in the |
| | | | CCAAT box) |
| Hemophilia (hemophilia A | blood | | A: FVIII, F8C, HEMA |
| (Classic) a B (aka Christmas | | | B: FVIX, HEMB |
| discasc) and C) | | | C: F9, F11 |
| Hepatic adenoma | liver | | TCF1, HNF1A, MODY3 |
| Hepatic failure, early onset, and | liver | | SCOD1, SCO1 |
| neurologic disorder | | | |
| Hepatic lipase deficiency | liver | | LIPC |
| Hepatoblastoma, cancer and | liver | | CTNNB1, PDGFRL, PDGRL, PRLTS, |
| carcinomas | | | AXIN1, AXIN, CTNNB1, TP53, P53, |
| | | | LFS1, IGF2R, MPRI, MET, CASP8, |
| | | | MCH5 |
| Hermansky-Pudlak syndrome | Skin, eyes, | | HPS1, HPS3, HPS4, HPS5, HPS6, |
| | blood, lung, | | HPS7, DTNBP1, BLOC1, BLOC1S2, |
| | kidneys, | | BLOC3 |
| | intestine | | |
| HIV susceptibility or infection | Immune system | | IL10, CSIF, CMKBR2, CCR2, |
| | | | CMKBR5, CCCKR5 (CCR5), those in |
| | | | WO2015148670A1 |
| Holoprosencephaly (HPE) | brain | | ACVRL1, ENG, SMAD4 |
| (Alobar, Semilobar, and Lobar) | | | |
| Homocystinuria | Metabolic | Various- | CBS, MTHFR, MTR, MTRR, and |
| | disease | connective | MMADHC |
| | | tissue, muscles, | |
| | | CNS, | |
| | | cardiovascular | |
| | | system | |
| HPV | | | HPV16 and HPV18 E6/E7 |
| HSV1, HSV2, and related | eye | | HSV1 genes (immediate early and late |
| keratitis | | | HSV-1 genes (UL1, 1.5, 5, 6, 8, 9, 12, |
| | | | 15, 16, 18, 19, 22, 23, 26, 26.5, 27, 28, |
| | | | 29, 30, 31, 32, 33, 34, 35, 36, 37, 38, |
| | | | 42, 48, 49.5, 50, 52, 54, S6, RL2, RS1, |
| | | | those described in WO2015153789, |
| | | | WO2015153791 |
| Hunter's Syndrome (aka | Lysosomal | Various- liver, | IDS |
| Mucopolysaccharidosis type II) | storage disease | spleen, eye, | |
| | | joint, heart, | |
| | | brain, skeletal | |
| Huntington's disease (HD) and | Brain, nervous | | HD, HTT, IT15, PRNP, PRIP, JPH3, |
| HD-like disorders | system | | JP3, HDL2, TBP, SCA17, PRKCE; |
| | | | IGF1; EP300; RCOR1; PRKCZ; |
| | | | HDAC4; and TGM2, and those |
| | | | described in WO2013130824, |
| | | | WO2015089354 |
| Hurler's Syndrome (aka | Lysosomal | Various- liver, | IDUA, α-L-iduronidasc |
| mucopolysaccharidosis type I H, | storage disease | spleen, eye, | |
| MPS IH) | | joint, heart, | |
| | | brain, skeletal | |
| Hurler-Scheie syndrome (aka | Lysosomal | Various- liver, | IDUA, α-L-iduronidase |
| mucopolysaccharidosis type I H- | storage disease | spleen, eye, | |
| S, MPS I H-S) | | joint, heart, | |
| | | brain, skeletal | |
| hyaluronidase deficiency (aka | Soft and | | HYAL1 |
| MPS IX) | connective | | |
| | tissues | | |
| Hyper IgM syndrome | Immune system | | CD40L |
| Hyper- tension caused renal | kidney | | Mineral corticoid receptor |
| damage | | | |
| Immunodeficiencies | Immune System | | CD3E, CD3G, AICDA, AID, HIGM2, |
| | | | TNFRSF5, CD40, UNG, DGU, |
| | | | HIGM4, TNFSF5, CD40LG, HIGM1, |
| | | | IGM, FOXP3, IPEX, AIID, XPID, |
| | | | PIDX, TNFRSF14B, TACI |
| Inborn errors of metabolism: | Metabolism | Various organs | See also: Carbohydrate metabolism |
| including urca cycle disorders, | diseases, liver | and cells | disorders (e.g., galactosemia), Amino |
| organic acidemias), fatty acid | | | acid Metabolism disorders (e.g., |
| oxidation defects, amino | | | phenylketonuria), Fatty acid |
| acidopathies, carbohydrate | | | metabolism (e.g., MCAD deficiency), |
| disorders, mitochondrial | | | Urca Cycle disorders (e.g., |
| disorders | | | Citrullinemia), Organic acidemias |
| | | | (e.g., Maple Syrup Urine disease), |
| | | | Mitochondrial disorders (e.g., |
| | | | MELAS), peroxisomal disorders (e.g., |
| | | | Zellweger syndrome) |
| Inflammation | Various | | IL-10; IL-1 (IL-1a; IL-1b); IL-13; IL- |
| | | | 17 (IL-17a (CTLA8); IL- |
| | | | 17b; IL-17c; IL-17d; IL-17f); II-23; |
| | | | Cx3cr1; ptpn22; TNFa; |
| | | | NOD2/CARD15 for IBD; IL-6; IL-12 |
| | | | (IL-12a; IL-12b); |
| | | | CTLA4; Cx3cl1 |
| Inflammatory Bowel Diseases | Gastrointestinal | Joints, skin | NOD2, IRGM, LRRK2, ATG5, |
| (e.g., Ulcerative Colitis and | | | ATG16L1, IRGM, GATM, ECM1, |
| Chron's Disease) | | | CDH1, LAMB1, HNF4A, GNA12, |
| | | | IL10, CARD9/15, CCR6, IL2RA, |
| | | | MST1, TNFSF15, REL, STAT3, |
| | | | IL23R, IL12B, FUT2 |
| Interstitial renal fibrosis | kidney | | TGF-β type II receptor |
| Job's Syndrome (aka Hyper IgE | Immune System | | STAT3, DOCK8 |
| Syndrome) | | | |
| Juvenile Retinoschisis | eye | | RS1, XLRS1 |
| Kabuki Syndrome 1 | | | MLL4, KMT2D |
| Kennedy Discase (aka | Muscles, brain, | | SBMA/SMAX1/AR |
| Spinobulbar Muscular Atrophy) | nervous system | | |
| Klinefelter syndrome | Various- | | Extra X chromosome in males |
| | particularly | | |
| | those involved | | |
| | in development | | |
| | of male | | |
| | characteristics | | |
| Lafora Disease | Brain, CNS | | EMP2A and EMP2B |
| Leber Congenital Amaurosis | eye | | CRB1, RP12, CORD2, CRD, CRX, |
| | | | IMPDH1, OTX2, AIPL1, CABP4, |
| | | | CCT2, CEP290, CLUAP1, CRB1, |
| | | | CRX, DTHD1, GDF6, GUCY2D, |
| | | | IFT140, IQCB1, KCNJ13, LCA5, |
| | | | LRAT, NMNAT1, PRPH2, RD3, |
| | | | RDH12, RPE65, RP20, RPGRIP1, |
| | | | SPATA7, TULP1, LCA1, LCA4, |
| | | | GUC2D, CORD6, LCA3, |
| Lesch-Nyhan Syndrome | Metabolism | Various - joints, | HPRT1 |
| | disease | cognitive, brain, | |
| | | nervous system | |
| Leukocyte deficiencies and | blood | | ITGB2, CD18, LCAMB, LAD, |
| disorders | | | EIF2B1, EIF2BA, EIF2B2, EIF2B3, |
| | | | EIF2B5, LVWM, CACH, CLE, |
| | | | EIF2B4 |
| Leukemia | Blood | | TAL1, TCL5, SCL, TAL2, FLT3, |
| | | | NBS1, NBS, ZNFN1A1, IK1, LYF1, |
| | | | HOXD4, HOX4B, BCR, CML, PHL, |
| | | | ALL, ARNT, KRAS2, RASK2, |
| | | | GMPS, AF10, ARHGEF12, LARG, |
| | | | KIAA0382, CALM, CLTH, CEBPA, |
| | | | CEBP, CHIC2, BTL, FLT3, KIT, |
| | | | PBT, LPP, NPM1, NUP214, D9S46E, |
| | | | CAN, CAIN, RUNX1, CBFA2, |
| | | | AML1, WHSC1L1, NSD3, FLT3, |
| | | | AFIQ, NPM1, NUMA1, ZNF145, |
| | | | PLZF, PML, MYL, STAT5B, AF10, |
| | | | CALM, CLTH, ARL11, ARLTS1, |
| | | | P2RX7, P2X7, BCR, CML, PHL, |
| | | | ALL, GRAF, NF1, VRNF, WSS, |
| | | | NFNS, PTPN11, PTP2C, SHP2, NS1, |
| | | | BCL2, CCND1, PRAD1, BCL1, |
| | | | TCRA, GATA1, GF1, ERYF1, NFE1, |
| | | | ABL1, NQO1, DIA4, NMOR1, |
| | | | NUP214, D9S46E, CAN, CAIN |
| Limb-girdle muscular dystrophy | muscle | | LGMD |
| diseases | | | |
| Lowe syndrome | brain, eyes, | | OCRL |
| | kidneys | | |
| Lupus glomerulo- nephritis | kidney | | MAPK1 |
| Machado- | Brain, CNS, | | ATX3 |
| Joseph's Disease (also known as | muscle | | |
| Spinocerebellar ataxia Type 3) | | | |
| Macular degeneration | eye | | ABC4, CBC1, CHM1, APOE, |
| | | | C1QTNF5, C2, C3, CCL2, CCR2, |
| | | | CD36, CFB, CFH, CFHR1, CFHR3, |
| | | | CNGB3, CP, CRP, CST3, CTSD, |
| | | | CX3CR1, ELOVL4, ERCC6, FBLN5, |
| | | | FBLN6, FSCN2, HMCN1, HTRA1, |
| | | | IL6, IL8, PLEKHA1, PROM1, |
| | | | PRPH2, RPGR, SERPING1, TCOF1, |
| | | | TIMP3, TLR3 |
| Macular Dystrophy | eye | | BEST1, C1QTNF5, CTNNA1, |
| | | | EFEMP1, ELOVL4, FSCN2, |
| | | | GUCA1B, HMCN1, IMPG1, OTX2, |
| | | | PRDM13, PROM1, PRPH2, RP1L1, |
| | | | TIMP3, ABCA4, CFH, DRAM2, |
| | | | IMG1, MFSD8, ADMD, STGD2, |
| | | | STGD3, RDS, RP7, PRPH, AVMD, |
| | | | AOFMD, VMD2 |
| Malattia Leventinesse | eve | | EFEMP1, FBLN3 |
| Maple Syrup Urine Disease | Metabolism | | BCKDHA, BCKDHB, and DBT |
| | disease | | |
| Marfan syndrome | Connective | Musculoskeletal | FBN1 |
| | tissue | | |
| Maroteaux-Lamy Syndrome (aka | Musculoskeletal | Liver, spleen | ARSB |
| MPS VI) | system, nervous | | |
| | system | | |
| McArdle's Disease (Glycogen | Glycogen | muscle | PYGM |
| Storage Disease Type V) | storage disease | | |
| Medullary cystic kidney disease | kidney | | UMOD, HNFJ, FJHN, MCKD2, |
| | | | ADMCKD2 |
| Metachromatic leukodystrophy | Lysosomal | Nervous system | ARSA |
| | storage disease | | |
| Methylmalonic acidemia (MMA) | Metabolism | | MMAA, MMAB, MUT, MMACHC, |
| | disease | | MMADHC, LMBRD1 |
| Morquio Syndrome (aka MPS IV | Connective | heart | GALNS |
| A and B) | tissue, skin, | | |
| | bone, eyes | | |
| Mucopolysaccharidosis diseases | Lysosomal | | See also Hurler/Scheie syndrome, |
| (Types I H/S, I H, II, III A B and | storage disease - | | Hurler disease, Sanfillipo syndrome, |
| C, I S, IVA and B, IX, VII, and | affects various | | Scheie syndrome, Morquio syndrome, |
| VI) | organs/tissues | | hyaluronidase deficiency, Sly |
| | | | syndrome, and Maroteaux-Lamy |
| | | | syndrome |
| Muscular Atrophy | muscle | | VAPB, VAPC, ALS8, SMN1, SMA1, |
| | | | SMA2, SMA3, SMA4, BSCL2, |
| | | | SPG17, GARS, SMAD1, CMT2D, |
| | | | HEXB, IGHMBP2, SMUBP2, |
| | | | CATF1, SMARD1 |
| Muscular dystrophy | muscle | | FKRP, MDC1C, LGMD2I, LAMA2, |
| | | | LAMM, LARGE, KIAA0609, |
| | | | MDC1D, FCMD, TTID, MYOT, |
| | | | CAPN3, CANP3, DYSF, LGMD2B, |
| | | | SGCG, LGMD2C, DMDA1, SCG3, |
| | | | SGCA, ADL, DAG2, LGMD2D, |
| | | | DMDA2, SGCB, LGMD2E, SGCD, |
| | | | SGD, LGMD2F, CMD1L, TCAP, |
| | | | LGMD2G, CMD1N, TRIM32, HT2A, |
| | | | LGMD2H, FKRP, MDC1C, LGMD2I, |
| | | | TTN, CMD1G, TMD, LGMD2J, |
| | | | POMT1, CAV3, LGMD1C, SEPN1, |
| | | | SELN, RSMD1, PLEC1, PLTN, EBS1 |
| Myotonic dystrophy (Type 1 and | Muscles | Eyes, heart, | CNBP (Type 2) and DMPK (Type 1) |
| Type 2) | | endocrine | |
| Neoplasia | | | PTEN; ATM; ATR; EGFR; ERBB2; |
| | | | ERBB3; ERBB4; |
| | | | Notch1; Notch2; Notch3; Notch4; |
| | | | AKT; AKT2; AKT3; HIF; |
| | | | HIF1a; HIF3a; Met; HRG; Bcl2; |
| | | | PPAR alpha; PPAR |
| | | | gamma; WT1 (Wilms Tumor); FGF |
| | | | Receptor Family |
| | | | members (5 members: 1, 2, 3, 4, 5); |
| | | | CDKN2a; APC; RB |
| | | | (retinoblastoma); MEN1; VHL; |
| | | | BRCA1; BRCA2; AR |
| | | | (Androgen Receptor); TSG101; IGF; |
| | | | IGF Receptor; Igf1 (4 |
| | | | variants); Igf2 (3 variants); Igf 1 |
| | | | Receptor; Igf 2 Receptor; |
| | | | Bax; Bcl2; caspases family (9 |
| | | | members: |
| | | | 1, 2, 3, 4, 6, 7, 8, 9, 12); Kras; Apc |
| Neurofibromatosis (NF) (NF1, | brain, spinal | | NF1, NF2 |
| formerly Recklinghausen's NF, | cord, nerves, | | |
| and NF2) | and skin | | |
| Niemann-Pick Lipidosis (Types | Lysosomal | Various- where | Types A and B: SMPD1; Type C: |
| A, B, and C) | Storage Disease | sphingomyelin | NPC1 or NPC2 |
| | | accumulates, | |
| | | particularly | |
| | | spleen, liver, | |
| | | blood, CNS | |
| Noonan Syndrome | Various - | | PTPN11, SOS1, RAF1 and KRAS |
| | musculoskeletal, | | |
| | heart, eyes, | | |
| | reproductive | | |
| | organs, blood | | |
| Norrie Disease or X-linked | eye | | NDP |
| Familial Exudative | | | |
| Vitreoretinopathy | | | |
| North Carolina Macular | eye | | MCDR1 |
| Dystrophy | | | |
| Osteogenesis imperfecta (OI) | bones, | | COL1A1, COL1A2, CRTAP, P3H |
| (Types I, II, III, IV, V, VI, VII) | musculoskeletal | | |
| Osteopetrosis | bones | | LRP5, BMND1, LRP7, LR3, OPPG, |
| | | | VBCH2, CLCN7, CLC7, OPTA2, |
| | | | OSTM1, GL, TCIRG1, TIRC7, |
| | | | OC116, OPTB1 |
| Patau's Syndrome | Brain, heart, | | Additional copy of chromosome 13 |
| (Trisomy 13) | skeletal system | | |
| Parkinson's disease (PD) | Brain, nervous | | SNCA (PARK1), UCHL1 (PARK 5), |
| | system | | and LRRK2 (PARK8), (PARK3), |
| | | | PARK2, PARK4, PARK7 (PARK7), |
| | | | PINK1 (PARK6); x-Synuclein, DJ-1, |
| | | | Parkin, NR4A2, NURR1, NOT, |
| | | | TINUR, SNCAIP, TBP, SCA17, |
| | | | NCAP, PRKN, PDJ, DBH, NDUFV2 |
| Pattern Dystrophy of the RPE | eye | | RDS/peripherin |
| Phenylketonuria (PKU) | Metabolism | Various due to | PAH, PKU1, QDPR, DHPR, PTS |
| | disorder | build-up of | |
| | | phenylalanine, | |
| | | phenyl ketones | |
| | | in tissues and | |
| | | CNS | |
| Polycystic kidney and hepatic | Kidney, liver | | FCYT, PKHD1, ARPKD, PKD1, |
| discase | | | PKD2, PKD4, PKDTS, PRKCSH, |
| | | | G19P1, PCLD, SEC63 |
| Pompe's Disease | Glycogen | Various - heart, | GAA |
| | storage disease | liver, spleen | |
| Porphyria (actually refers to a | Various- | | ALAD, ALAS2, CPOX, FECH, |
| group of different diseases all | wherever heme | | HMBS, PPOX, UROD, or UROS |
| having a specific heme | precursors | | |
| production process abnormality) | accumulate | | |
| posterior polymorphous corneal | eyes | | TCF4; COL8A2 |
| dystrophy | | | |
| Primary Hyperoxaluria (e.g., type | Various - eyes, | | LDHA (lactate dehydrogenase A) and |
| 1) | heart, kidneys, | | hydroxyacid oxidase 1 (HAO1) |
| | skeletal system | | |
| Primary Open Angle Glaucoma | eyes | | MYOC |
| (POAG) | | | |
| Primary sclerosing cholangitis | Liver, | | TCF4; COL8A2 |
| | gallbladder | | |
| Progeria (also called Hutchinson- | All | | LMNA |
| Gilford progeria syndrome) | | | |
| Prader-Willi Syndrome | Musculoskeletal | | Deletion of region of short arm of |
| | system, brain, | | chromosome 15, including UBE3A |
| | reproductive | | |
| | and endocrine | | |
| | system | | |
| Prostate Cancer | prostate | | HOXB13, MSMB, GPRC6A, TP53 |
| Pyruvate Dehydrogenase | Brain, nervous | | PDHA1 |
| Deficiency | system | | |
| Kidney/Renal carcinoma | kidney | | RLIP76, VEGF |
| Rett Syndrome | Brain | | MECP2, RTT, PPMX, MRX16, |
| | | | MRX79, CDKL5, STK9, MECP2, |
| | | | RTT, PPMX, MRX16, MRX79, X- |
| | | | Synuclein, DJ-1 |
| Retinitis pigmentosa (RP) | eye | | ADIPOR1, ABCA4, AGBL5, |
| | | | ARHGEF18, ARL2BP, ARL3, ARL6, |
| | | | BEST1, BBS1, BBS2, C2ORF71, |
| | | | C8ORF37, CA4, CERKL, CLRN1, |
| | | | CNGA1, CMGB1, CRB1, CRX, |
| | | | CYP4V2, DHDDS, DHX38, EMC1, |
| | | | EYS, FAM161A, FSCN2, GPR125, |
| | | | GUCA1B, HK1, HPRPF3, HGSNAT, |
| | | | IDH3B, IMPDH1, IMPG2, IFT140, |
| | | | IFT172, KLHL7, KIAA1549, KIZ, |
| | | | LRAT, MAK, MERTK, MVK, NEK2, |
| | | | NUROD1, NR2E3, NRL, OFD1, |
| | | | PDE6A, PDE6B, PDE6G, POMGNT1, |
| | | | PRCD, PROM1, PRPF3, PRPF4, |
| | | | PRPF6, PRPF8, PRPF31, PRPH2, |
| | | | RPB3, RDH12, REEP6, RP39, RGR, |
| | | | RHO, RLBP1, ROM1, RP1, RP1L1, |
| | | | RPY, RP2, RP9, RPE65, RPGR, |
| | | | SAMD11, SAG, SEMA4A, SLC7A14, |
| | | | SNRNP200, SPP2, SPATA7, TRNT1, |
| | | | TOPORS, TTC8, TULP1, USH2A, |
| | | | ZFN408, ZNF513, see also |
| | | | 20120204282 |
| Scheie syndrome (also known as | Various- liver, | | IDUA, α-L-iduronidase |
| mucopolysaccharidosis type I | spleen, eye, | | |
| S(MPS I-S)) | joint, heart, | | |
| | brain, skeletal | | |
| Schizophrenia | Brain | | Neuregulin1 (Nrg1); Erb4 (receptor for |
| | | | Neuregulin); |
| | | | Complexin1 (Cplx1); Tph1 |
| | | | Tryptophan hydroxylase; Tph2 |
| | | | Tryptophan hydroxylase 2; Neurexin |
| | | | 1; GSK3; GSK3a; |
| | | | GSK3b; 5-HTT (Slc6a4); COMT; |
| | | | DRD (Drd1a): SLC6A3; DAOA; |
| | | | DTNBP1; Dao (Dao1); TCF4; |
| | | | COL8A2 |
| Secretase Related Disorders | Various | | APH-1 (alpha and beta); PSEN1; |
| | | | NCSTN; PEN-2; Nos1, Parp1, Nat1, |
| | | | Nat2, CTSB, APP, APH1B, PSEN2, |
| | | | PSENEN, BACE1, ITM2B, CTSD, |
| | | | NOTCH1, TNF, INS, DYT10, |
| | | | ADAM17, APOE, ACE, STN, TP53, |
| | | | IL6, NGFR, IL1B, ACHE, CTNNB1, |
| | | | IGF1, IFNG, NRG1, CASP3, MAPK1, |
| | | | CDH1, APBB1, HMGCR, CREB1, |
| | | | PTGS2, HES1, CAT, TGFB1, ENO2, |
| | | | ERBB4, TRAPPC10, MAOB, NGF, |
| | | | MMP12, JAG1, CD40LG, PPARG, |
| | | | FGF2, LRP1, NOTCH4, MAPK8, |
| | | | PREP, NOTCH3, PRNP, CTSG, EGF, |
| | | | REN, CD44, SELP, GHR, ADCYAP1, |
| | | | INSR, GFAP, MMP3, MAPK10, SP1, |
| | | | MYC, CTSE, PPARA, JUN, TIMP1, |
| | | | IL5, IL1A, MMP9, HTR4, HSPG2, |
| | | | KRAS, CYCS, SMG1, IL1R1, |
| | | | PROK1, MAPK3, NTRK1, IL13, |
| | | | MME, TKT, CXCR2, CHRM1, |
| | | | ATXN1, PAWR, NOTCJ2, M6PR, |
| | | | CYP46A1, CSNK1D, MAPK14, |
| | | | PRG2, PRKCA, L1 CAM, CD40, |
| | | | NR1I2, JAG2, CTNND1, CMA1, |
| | | | SORT1, DLK1, THEM4, JUP, CD46, |
| | | | CCL11, CAV3, RNASE3, HSPA8, |
| | | | CASP9, CYP3A4, CCR3, TFAP2A, |
| | | | SCP2, CDK4, JOF1A, TCF7L2, |
| | | | B3GALTL, MDM2, RELA, CASP7, |
| | | | IDE, FANP4, CASK, ADCYAP1R1, |
| | | | ATF4, PDGFA, C21ORF33, SCG5, |
| | | | RMF123, NKFB1, ERBB2, CAV1, |
| | | | MMP7, TGFA, RXRA, STX1A, |
| | | | PSMC4, P2RY2, TNFRSF21, DLG1, |
| | | | NUMBL, SPN, PLSCR1, UBQLN2, |
| | | | UBQLN1, PCSK7, SPON1, SILV, |
| | | | QPCT, HESS, GCC1 |
| Selective IgA Deficiency | Immune system | | Type 1: MSH5; Type 2: TNFRSF13B |
| Severe Combined | Immune system | | JAK3, JAKL, DCLRE1C, ARTEMIS, |
| Immunodeficiency (SCID) and | | | SCIDA, RAG1, RAG2, ADA, PTPRC, |
| SCID-X1, and ADA-SCID | | | CD45, LCA, IL7R, CD3D, T3D, |
| | | | IL2RG, SCIDX1, SCIDX, IMD4, |
| | | | those identified in US Pat. App. Pub. |
| | | | 20110225664, 20110091441, |
| | | | 20100229252, 20090271881 and |
| | | | 20090222937; |
| Sickle cell disease | blood | | HBB, BCL11A, BCL11Ae, cis- |
| | | | regulatory elements of the B-globin |
| | | | locus, HBG 1/2 promoter, HBG distal |
| | | | CCAAT box region between −92 |
| | | | and −130 of the HBG Transcription |
| | | | Start Site, those described in |
| | | | WO2015148863, WO 2013/126794, |
| | | | US Pat. Pub. 20110182867 |
| Sly Syndrome (aka MPS VII) | | | GUSB |
| Spinocerebellar Ataxias (SCA | | | ATXN1, ATXN2, ATX3 |
| types 1, 2, 3, 6, 7, 8, 12 and 17) | | | |
| Sorsby Fundus Dystrophy | eye | | TIMP3 |
| Stargardt disease | eye | | ABCR, ELOVL4, ABCA4, PROM1 |
| Tay-Sachs Disease | Lysosomal | Various - CNS, | HEX-A |
| | Storage disease | brain, eye | |
| Thalassemia (Alpha, Beta, Delta) | blood | | HBA1, HBA2 (Alpha), HBB (Beta), |
| | | | HBB and HBD (delta), LCRB, |
| | | | BCL11A, BCL11Ae, cis-regulatory |
| | | | elements of the B-globin locus, HBG |
| | | | 1/2 promoter, those described in |
| | | | WO2015148860, US Pat. Pub. |
| | | | 20110182867, 2015/148860 |
| Thymic Aplasia (DiGeorge | Immune system, | | deletion of 30 to 40 genes in the |
| Syndrome; 22q11.2 deletion | thy mus | | middle of chromosome 22 at |
| syndrome) | | | a location known as 22q11.2, including |
| | | | TBX1, DGCR8 |
| Transthyretin amyloidosis | liver | | TTR (transthyretin) |
| (ATTR) | | | |
| trimethylaminuria | Metabolism | | FMO3 |
| | disease | | |
| Trinucleotide Repeat Disorders | Various | | HTT; SBMA/SMAX1/AR; |
| (generally) | | | FXN/X25 ATX3; |
| | | | ATXN1; ATXN2; |
| | | | DMPK; Atrophin-1 and Atn1 |
| | | | (DRPLA Dx); CBP (Creb-BP - global |
| | | | instability); VLDLR; Atxn7; Atxn10; |
| | | | FEN1, TNRC6A, PABPN1, JPH3, |
| | | | MED15, ATXN1, ATXN3, TBP, |
| | | | CACNA1A, ATXN80S, PPP2R2B, |
| | | | ATXN7, TNRC6B, TNRC6C, CELF3, |
| | | | MAB21L1, MSH2, TMEM185A, |
| | | | SIX5, CNPY3, RAXE, GNB2, RPL14, |
| | | | ATXN8, ISR, TTR, EP400, GIGYF2, |
| | | | OGG1, STC1, CNDP1, C10ORF2, |
| | | | MAML3, DKC1, PAXIP1, CASK, |
| | | | MAPT, SP1, POLG, AFF2, THBS1, |
| | | | TP53, ESR1, CGGBP1, ABT1, KLK3, |
| | | | PRNP, JUN, KCNN3, BAX, FRAXA, |
| | | | KBTBD10, MBNL1, RAD51, |
| | | | NCOA3, ERDA1, TSC1, COMP, |
| | | | GGLC, RRAD, MSH3, DRD2, CD44, |
| | | | CTCF, CCND1, CLSPN, MEF2A, |
| | | | PTPRU, GAPDH, TRIM22, WT1, |
| | | | AHR, GPX1, TPMT, NDP, ARX, |
| | | | TYR, EGR1, UNG, NUMBL, FABP2, |
| | | | EN2, CRYGC, SRP14, CRYGB, |
| | | | PDCD1, HOXA1, ATXN2L, PMS2, |
| | | | GLA, CBL, FTH1, IL12RB2, OTX2, |
| | | | HOXA5, POLG2, DLX2, AHRR, |
| | | | MANF, RMEM158, see also |
| | | | 20110016540 |
| Turner's Syndrome (XO) | Various - | | Monosomy X |
| | reproductive | | |
| | organs, and sex | | |
| | characteristics, | | |
| | vasculature | | |
| Tuberous Sclerosis | CNS, heart, | | TSC1, TSC2 |
| | kidneys | | |
| Usher syndrome (Types I, II, and | Ears, eyes | | ABHD12, CDH23, CIB2, CLRN1, |
| III) | | | DFNB31, GPR98, HARS, MYO7A, |
| | | | PCDH15, USH1C, USH1G, USH2A, |
| | | | USH11A, those described in |
| | | | WO2015134812A1 |
| Velocardiofacial syndrome (aka | Various - | | Many genes are deleted, COM, TBX1, |
| 22q11.2 deletion syndrome, | skeletal, heart, | | and other are associated with |
| DiGeorge syndrome, conotruncal | kidney, immune | | symptoms |
| anomaly face syndrome (CTAF), | system, brain | | |
| autosomal dominant Opitz G/BB | | | |
| syndrome or Cayler cardiofacial | | | |
| syndrome) | | | |
| Von Gierke's Disease (Glycogen | Glycogen | Various - liver, | G6PC and SLC37A4 |
| Storage Disease type I) | Storage disease | kidney | |
| Von Hippel-Lindau Syndrome | Various - cell | CNS, Kidney, | VHL |
| | growth | Eye, visceral | |
| | regulation | organs | |
| | disorder | | |
| Von Willebrand Disease (Types | blood | | VWF |
| I, II and III) | | | |
| Wilson Disease | Various - | Liver, brains, | ATP7B |
| | Copper Storage | eyes, other | |
| | Disease | tissues where | |
| | | copper builds up | |
| Wiskott-Aldrich Syndrome | Immune System | | WAS |
| Xeroderma Pigmentosum | Skin | Nervous system | POLH |
| XXX Syndrome | Endocrine, brain | | X chromosome trisomy |

[0655] In one embodiment, the compositions, systems, or components thereof can be used treat or prevent a disease in a subject by modifying one or more genes associated with one or more cellular functions, such as any one or more of those in Table 4B. In one embodiment, the disease is a genetic disease or disorder. In some of embodiments, the composition, system, or component thereof can modify one or more genes or polynucleotides associated with one or more genetic diseases such as any set forth in Table 4B.

TABLE 4B
Exemplary Genes controlling Cellular Functions

| CELLULAR FUNCTION | GENES |
|---|---|
| PI3K/AKT Signaling | PRKCE; ITGAM; ITGA5; IRAK1; PRKAA2; EIF2AK2; PTEN; EIF4E; |
| | PRKCZ; GRK6; MAPK1; TSC1; PLK1; AKT2; IKBKB; PIK3CA; CDK8; |
| | CDKN1B; NFKB2; BCL2; PIK3CB; PPP2R1A; MAPK8; BCL2L1; |
| | MAPK3; TSC2; |
| | ITGA1; KRAS; EIF4EBP1; RELA; PRKCD; NOS3; |
| | PRKAA1; MAPK9; CDK2; PPP2CA; PIM1; ITGB7; |
| | YWHAZ; ILK; TP53; RAF1; IKBKG; RELB; DYRK1A; |
| | CDKN1A; ITGB1; MAP2K2; JAK1; AKT1; JAK2; PIK3R1; |
| | CHUK; PDPK1; PPP2R5C; CTNNB1; MAP2K1; NFKB1; |
| | PAK3; ITGB3; CCND1; GSK3A; FRAP1; SFN; ITGA2; |
| | TTK; CSNK1A1; BRAF; GSK3B; AKT3; FOX01; SGK; |
| | HSP90AA1; RPS6KB1 |
| ERK/MAPK Signaling | PRKCE; ITGAM; ITGA5; HSPB1; IRAK1; PRKAA2; |
| | EIF2AK2; RAC1; RAP1A; TLN1; EIF4E; ELK1; GRK6; |
| | MAPK1; RAC2; PLK1; AKT2; PIK3CA; CDK8; CREB1; |
| | PRKCI; PTK2; FOS; RPS6KA4; PIK3CB; PPP2R1A; |
| | PIK3C3; MAPK8; MAPK3; ITGA1; ETS1; KRAS; MYCN; |
| | EIF4EBP1; PPARG; PRKCD; PRKAA1; MAPK9; SRC; |
| | CDK2; PPP2CA; PIM1; PIK3C2A; ITGB7; YWHAZ; |
| | PPP1CC; KSR1; PXN; RAF1; FYN; DYRK1A; ITGB1; |
| | MAP2K2; PAK4; PIK3R1; STAT3; PPP2R5C; MAP2K1; |
| | PAK3; ITGB3; ESR1; ITGA2; MYC; TTK; CSNK1A1; |
| | CRKL; BRAF; ATF4; PRKCA; SRF; STAT1; SGK |
| Glucocorticoid Receptor | RAC1; TAF4B; EP300; SMAD2; TRAF6; PCAF; ELK1; |
| Signaling | MAPK1; SMAD3; AKT2; IKBKB; NCOR2; UBE2I; |
| | PIK3CA; CREB1; FOS; HSPA5; NFKB2; BCL2; |
| | MAP3K14; STAT5B; PIK3CB; PIK3C3; MAPK8; BCL2L1; |
| | MAPK3; TSC22D3; MAPK10; NRIP1; KRAS; MAPK13; |
| | RELA; STAT5A; MAPK9; NOS2A; PBX1; NR3C1; |
| | PIK3C2A; CDKN1C; TRAF2; SERPINE1; NCOA3; |
| | MAPK14; TNF; RAF1; IKBKG; MAP3K7; CREBBP; |
| | CDKN1A; MAP2K2; JAK1; IL8; NCOA2; AKT1; JAK2; |
| | PIK3R1; CHUK; STAT3; MAP2K1; NFKB1; TGFBR1; |
| | ESR1; SMAD4; CEBPB; JUN; AR; AKT3; CCL2; MMP1; |
| | STAT1; IL6; HSP90AA1 |
| Axonal Guidance Signaling | PRKCE; ITGAM; ROCK1; ITGA5; CXCR4; ADAM12; |
| | IGF1; RAC1; RAP1A; EIF4E; PRKCZ; NRP1; NTRK2; |
| | ARHGEF7; SMO; ROCK2; MAPK1; PGF; RAC2; |
| | PTPN11; GNAS; AKT2; PIK3CA; ERBB2; PRKCI; PTK2; |
| | CFL1; GNAQ; PIK3CB; CXCL12; PIK3C3; WNT11; |
| | PRKD1; GNB2L1; ABL1; MAPK3; ITGA1; KRAS; RHOA; |
| | PRKCD; PIK3C2A; ITGB7; GLI2; PXN; VASP; RAF1; |
| | FYN; ITGB1; MAP2K2; PAK4; ADAM17; AKT1; PIK3R1; |
| | GLI1; WNT5A; ADAM10; MAP2K1; PAK3; ITGB3; |
| | CDC42; VEGFA; ITGA2; EPHA8; CRKL; RND1; GSK3B; |
| | AKT3; PRKCA |
| Ephrin Receptor Signaling | PRKCE; ITGAM; ROCK1; ITGA5; CXCR4; IRAK1; |
| Actin Cytoskeleton | PRKAA2; EIF2AK2; RAC1; RAP1A; GRK6; ROCK2; |
| | MAPK1; PGF; RAC2; PTPN11; GNAS; PLK1; AKT2; |
| | DOK1; CDK8; CREB1; PTK2; CFL1; GNAQ; MAP3K14; |
| | CXCL12; MAPK8; GNB2L1; ABL1; MAPK3; ITGA1; |
| | KRAS; RHOA; PRKCD; PRKAA1; MAPK9; SRC; CDK2; |
| | PIM1; ITGB7; PXN; RAF1; FYN; DYRK1A; ITGB1; |
| | MAP2K2; PAK4; AKT1; JAK2; STAT3; ADAM10; |
| | MAP2K1; PAK3; ITGB3; CDC42; VEGFA; ITGA2; |
| | EPHA8; TTK; CSNK1A1; CRKL; BRAF; PTPN13; ATF4; |
| | AKT3; SGK |
| Signaling | ACTN4; PRKCE; ITGAM; ROCK1; ITGA5; IRAK1; |
| | PRKAA2; EIF2AK2; RAC1; INS; ARHGEF7; GRK6; |
| | ROCK2; MAPK1; RAC2; PLK1; AKT2; PIK3CA; CDK8; |
| | PTK2; CFL1; PIK3CB; MYH9; DIAPH1; PIK3C3; MAPK8; |
| | F2R; MAPK3; SLC9A1; ITGA1; KRAS; RHOA; PRKCD; |
| | PRKAA1; MAPK9; CDK2; PIM1; PIK3C2A; ITGB7; |
| | PPP1CC; PXN; VIL2; RAF1; GSN; DYRK1A; ITGB1; |
| | MAP2K2; PAK4; PIP5K1A; PIK3R1; MAP2K1; PAK3; |
| | ITGB3; CDC42; APC; ITGA2; TTK; CSNK1A1; CRKL; |
| | BRAF; VAV3; SGK |
| Huntington's Disease | PRKCE; IGF1; EP300; RCOR1; PRKCZ; HDAC4; TGM2; |
| Signaling | MAPK1; CAPNS1; AKT2; EGFR; NCOR2; SP1; CAPN2; |
| | PIK3CA; HDAC5; CREB1; PRKCI; HSPA5; REST; |
| | GNAQ; PIK3CB; PIK3C3; MAPK8; IGF1R; PRKD1; |
| | GNB2L1; BCL2L1; CAPN1; MAPK3; CASP8; HDAC2; |
| | HDAC7A; PRKCD; HDAC11; MAPK9; HDAC9; PIK3C2A; |
| | HDAC3; TP53; CASP9; CREBBP; AKT1; PIK3R1; |
| | PDPK1; CASP1; APAF1; FRAP1; CASP2; JUN; BAX; |
| | ATF4; AKT3; PRKCA; CLTC; SGK; HDAC6; CASP3 |
| Apoptosis Signaling | PRKCE; ROCK1; BID; IRAK1; PRKAA2; EIF2AK2; BAK1; |
| | BIRC4; GRK6; MAPK1; CAPNS1; PLK1; AKT2; IKBKB; |
| | CAPN2; CDK8; FAS; NFKB2; BCL2; MAP3K14; MAPK8; |
| | BCL2L1; CAPN1; MAPK3; CASP8; KRAS; RELA; |
| | PRKCD; PRKAA1; MAPK9; CDK2; PIM1; TP53; TNF; |
| | RAF1; IKBKG; RELB; CASP9; DYRK1A; MAP2K2; |
| | CHUK; APAF1; MAP2K1; NFKB1; PAK3; LMNA; CASP2; |
| | BIRC2; TTK; CSNK1A1; BRAF; BAX; PRKCA; SGK; |
| | CASP3; BIRC3; PARP1 |
| B Cell Receptor Signaling | RAC1; PTEN; LYN; ELK1; MAPK1; RAC2; PTPN11; |
| | AKT2; IKBKB; PIK3CA; CREB1; SYK; NFKB2; CAMK2A; |
| | MAP3K14; PIK3CB; PIK3C3; MAPK8; BCL2L1; ABL1; |
| | MAPK3; ETS1; KRAS; MAPK13; RELA; PTPN6; MAPK9; |
| | EGR1; PIK3C2A; BTK; MAPK14; RAF1; IKBKG; RELB; |
| | MAP3K7; MAP2K2; AKT1; PIK3R1; CHUK; MAP2K1; |
| | NFKB1; CDC42; GSK3A; FRAP1; BCL6; BCL10; JUN; |
| | GSK3B; ATF4; AKT3; VAV3; RPS6KB1 |
| Leukocyte Extravasation | ACTN4; CD44; PRKCE; ITGAM; ROCK1; CXCR4; CYBA; |
| Signaling | RAC1; RAP1A; PRKCZ; ROCK2; RAC2; PTPN11; |
| | MMP14; PIK3CA; PRKCI; PTK2; PIK3CB; CXCL12; |
| | PIK3C3; MAPK8; PRKD1; ABL1; MAPK10; CYBB; |
| | MAPK13; RHOA; PRKCD; MAPK9; SRC; PIK3C2A; BTK; |
| | MAPK14; NOX1; PXN; VIL2; VASP; ITGB1; MAP2K2; |
| | CTNND1; PIK3R1; CTNNB1; CLDN1; CDC42; F11R; ITK; |
| | CRKL; VAV3; CTTN; PRKCA; MMP1; MMP9 |
| Integrin Signaling | ACTN4; ITGAM; ROCK1; ITGA5; RAC1; PTEN; RAP1A; |
| | TLN1; ARHGEF7; MAPK1; RAC2; CAPNS1; AKT2; |
| | CAPN2; PIK3CA; PTK2; PIK3CB; PIK3C3; MAPK8; |
| | CAV1; CAPN1; ABL1; MAPK3; ITGA1; KRAS; RHOA; |
| | SRC; PIK3C2A; ITGB7; PPP1CC; ILK; PXN; VASP; |
| | RAF1; FYN; ITGB1; MAP2K2; PAK4; AKT1; PIK3R1; |
| | TNK2; MAP2K1; PAK3; ITGB3; CDC42; RND3; ITGA2; |
| | CRKL; BRAF; GSK3B; AKT3 |
| Acute Phase Response | IRAK1; SOD2; MYD88; TRAF6; ELK1; MAPK1; PTPN11; |
| Signaling | AKT2; IKBKB; PIK3CA; FOS; NFKB2; MAP3K14; |
| | PIK3CB; MAPK8; RIPK1; MAPK3; IL6ST; KRAS; |
| | MAPK13; IL6R; RELA; SOCS1; MAPK9; FTL; NR3C1; |
| | TRAF2; SERPINE1; MAPK14; TNF; RAF1; PDK1; |
| | IKBKG; RELB; MAP3K7; MAP2K2; AKT1; JAK2; PIK3R1; |
| | CHUK; STAT3; MAP2K1; NFKB1; FRAP1; CEBPB; JUN; |
| | AKT3; IL1R1; IL6 |
| PTEN Signaling | ITGAM; ITGA5; RAC1; PTEN; PRKCZ; BCL2L11; |
| | MAPK1; RAC2; AKT2; EGFR; IKBKB; CBL; PIK3CA; |
| | CDKN1B; PTK2; NFKB2; BCL2; PIK3CB; BCL2L1; |
| | MAPK3; ITGA1; KRAS; ITGB7; ILK; PDGFRB; INSR; |
| | RAF1; IKBKG; CASP9; CDKN1A; ITGB1; MAP2K2; |
| | AKT1; PIK3R1; CHUK; PDGFRA; PDPK1; MAP2K1; |
| | NFKB1; ITGB3; CDC42; CCND1; GSK3A; ITGA2; |
| | GSK3B; AKT3; FOXO1; CASP3; RPS6KB1 |
| p53 Signaling | PTEN; EP300; BBC3; PCAF; FASN; BRCA1; GADD45A; |
| Aryl Hydrocarbon Receptor | BIRC5; AKT2; PIK3CA; CHEK1; TP53INP1; BCL2; |
| | PIK3CB; PIK3C3; MAPK8; THBS1; ATR; BCL2L1; E2F1; |
| | PMAIP1; CHEK2; TNFRSF10B; TP73; RB1; HDAC9; |
| | CDK2; PIK3C2A; MAPK14; TP53; LRDD; CDKN1A; |
| | HIPK2; AKT1; PIK3R1; RRM2B; APAF1; CTNNB1; |
| | SIRT1; CCND1; PRKDC; ATM; SFN; CDKN2A; JUN; |
| | SNAI2; GSK3B; BAX; AKT3 |
| Signaling | HSPB1; EP300; FASN; TGM2; RXRA; MAPK1; NQO1; |
| | NCOR2; SP1; ARNT; CDKN1B; FOS; CHEK1; |
| | SMARCA4; NFKB2; MAPK8; ALDH1A1; ATR; E2F1; |
| | MAPK3; NRIP1; CHEK2; RELA; TP73; GSTP1; RB1; |
| | SRC; CDK2; AHR; NFE2L2; NCOA3; TP53; TNF; |
| | CDKN1A; NCOA2; APAF1; NFKB1; CCND1; ATM; ESR1; |
| | CDKN2A; MYC; JUN; ESR2; BAX; IL6; CYP1B1; |
| | HSP90AA1 |
| Xenobiotic Metabolism | PRKCE; EP300; PRKCZ; RXRA; MAPK1; NQO1; |
| Signaling | NCOR2; PIK3CA; ARNT; PRKCI; NFKB2; CAMK2A; |
| | PIK3CB; PPP2R1A; PIK3C3; MAPK8; PRKD1; |
| | ALDH1A1; MAPK3; NRIP1; KRAS; MAPK13; PRKCD; |
| | GSTP1; MAPK9; NOS2A; ABCB1; AHR; PPP2CA; FTL; |
| | NFE2L2; PIK3C2A; PPARGC1A; MAPK14; TNF; RAF1; |
| | CREBBP; MAP2K2; PIK3R1; PPP2R5C; MAP2K1; |
| | NFKB1; KEAP1; PRKCA; EIF2AK3; IL6; CYP1B1; |
| | HSP90AA1 |
| SAPK/JNK Signaling | PRKCE; IRAK1; PRKAA2; EIF2AK2; RAC1; ELK1; |
| | GRK6; MAPK1; GADD45A; RAC2; PLK1; AKT2; PIK3CA; |
| | FADD; CDK8; PIK3CB; PIK3C3; MAPK8; RIPK1; |
| | GNB2L1; IRS1; MAPK3; MAPK10; DAXX; KRAS; |
| | PRKCD; PRKAA1; MAPK9; CDK2; PIM1; PIK3C2A; |
| | TRAF2; TP53; LCK; MAP3K7; DYRK1A; MAP2K2; |
| | PIK3R1; MAP2K1; PAK3; CDC42; JUN; TTK; CSNK1A1; |
| | CRKL; BRAF; SGK |
| PPAr/RXR Signaling | PRKAA2; EP300; INS; SMAD2; TRAF6; PPARA; FASN; |
| | RXRA; MAPK1; SMAD3; GNAS; IKBKB; NCOR2; |
| | ABCA1; GNAQ; NFKB2; MAP3K14; STAT5B; MAPK8; |
| | IRS1; MAPK3; KRAS; RELA; PRKAA1; PPARGC1A; |
| | NCOA3; MAPK14; INSR; RAF1; IKBKG; RELB; MAP3K7; |
| | CREBBP; MAP2K2; JAK2; CHUK; MAP2K1; NFKB1; |
| | TGFBR1; SMAD4; JUN; IL1R1; PRKCA; IL6; HSP90AA1; |
| | ADIPOQ |
| NF-KB Signaling | IRAK1; EIF2AK2; EP300; INS; MYD88; PRKCZ; TRAF6; |
| | TBK1; AKT2; EGFR; IKBKB; PIK3CA; BTRC; NFKB2; |
| | MAP3K14; PIK3CB; PIK3C3; MAPK8; RIPK1; HDAC2; |
| | KRAS; RELA; PIK3C2A; TRAF2; TLR4; PDGFRB; TNF; |
| | INSR; LCK; IKBKG; RELB; MAP3K7; CREBBP; AKT1; |
| | PIK3R1; CHUK; PDGFRA; NFKB1; TLR2; BCL10; |
| | GSK3B; AKT3; TNFAIP3; IL1R1 |
| Neuregulin Signaling | ERBB4; PRKCE; ITGAM; ITGA5; PTEN; PRKCZ; ELK1; |
| Wnt & Beta catenin | MAPK1; PTPN11; AKT2; EGFR; ERBB2; PRKCI; |
| | CDKN1B; STAT5B; PRKD1; MAPK3; ITGA1; KRAS; |
| | PRKCD; STAT5A; SRC; ITGB7; RAF1; ITGB1; MAP2K2; |
| | ADAM17; AKT1; PIK3R1; PDPK1; MAP2K1; ITGB3; |
| | EREG; FRAP1; PSEN1; ITGA2; MYC; NRG1; CRKL; |
| | AKT3; PRKCA; HSP90AA1; RPS6KB1 |
| Signaling | CD44; EP300; LRP6; DVL3; CSNK1E; GJA1; SMO; |
| | AKT2; PIN1; CDH1; BTRC; GNAQ; MARK2; PPP2R1A; |
| | WNT11; SRC; DKK1; PPP2CA; SOX6; SFRP2; ILK; |
| | LEF1; SOX9; TP53; MAP3K7; CREBBP; TCF7L2; AKT1; |
| | PPP2R5C; WNT5A; LRP5; CTNNB1; TGFBR1; CCND1; |
| | GSK3A; DVL1; APC; CDKN2A; MYC; CSNK1A1; GSK3B; |
| | AKT3; SOX2 |
| Insulin Receptor Signaling | PTEN; INS; EIF4E; PTPN1; PRKCZ; MAPK1; TSC1; |
| | PTPN11; AKT2; CBL; PIK3CA; PRKCI; PIK3CB; PIK3C3; |
| | MAPK8; IRS1; MAPK3; TSC2; KRAS; EIF4EBP1; |
| | SLC2A4; PIK3C2A; PPP1CC; INSR; RAF1; FYN; |
| | MAP2K2; JAK1; AKT1; JAK2; PIK3R1; PDPK1; MAP2K1; |
| | GSK3A; FRAP1; CRKL; GSK3B; AKT3; FOXO1; SGK; |
| | RPS6KB1 |
| IL-6 Signaling | HSPB1; TRAF6; MAPKAPK2; ELK1; MAPK1; PTPN11; |
| | IKBKB; FOS; NFKB2; MAP3K14; MAPK8; MAPK3; |
| | MAPK10; IL6ST; KRAS; MAPK13; IL6R; RELA; SOCS1; |
| | MAPK9; ABCB1; TRAF2; MAPK14; TNF; RAF1; IKBKG; |
| | RELB; MAP3K7; MAP2K2; IL8; JAK2; CHUK; STAT3; |
| | MAP2K1; NFKB1; CEBPB; JUN; IL1R1; SRF; IL6 |
| Hepatic Cholestasis | PRKCE; IRAK1; INS; MYD88; PRKCZ; TRAF6; PPARA; |
| | RXRA; IKBKB; PRKCI; NFKB2; MAP3K14; MAPK8; |
| | PRKD1; MAPK10; RELA; PRKCD; MAPK9; ABCB1; |
| | TRAF2; TLR4; TNF; INSR; IKBKG; RELB; MAP3K7; IL8; |
| | CHUK; NR1H2; TJP2; NFKB1; ESR1; SREBF1; FGFR4; |
| | JUN; IL1R1; PRKCA; IL6 |
| IGF-1 Signaling | IGF1; PRKCZ; ELK1; MAPK1; PTPN11; NEDD4; AKT2; |
| | PIK3CA; PRKCI; PTK2; FOS; PIK3CB; PIK3C3; MAPK8; |
| | IGF1R; IRS1; MAPK3; IGFBP7; KRAS; PIK3C2A; |
| | YWHAZ; PXN; RAF1; CASP9; MAP2K2; AKT1; PIK3R1; |
| | PDPK1; MAP2K1; IGFBP2; SFN; JUN; CYR61; AKT3; |
| | FOXO1; SRF; CTGF; RPS6KB1 |
| NRF2-mediated Oxidative | PRKCE; EP300; SOD2; PRKCZ; MAPK1; SQSTM1; |
| Stress Response | NQO1; PIK3CA; PRKCI; FOS; PIK3CB; PIK3C3; MAPK8; |
| | PRKD1; MAPK3; KRAS; PRKCD; GSTP1; MAPK9; FTL; |
| | NFE2L2; PIK3C2A; MAPK14; RAF1; MAP3K7; CREBBP; |
| | MAP2K2; AKT1; PIK3R1; MAP2K1; PPIB; JUN; KEAP1; |
| | GSK3B; ATF4; PRKCA; EIF2AK3; HSP90AA1 |
| Hepatic Fibrosis/Hepatic | EDN1; IGF1; KDR; FLT1; SMAD2; FGFR1; MET; PGF; |
| Stellate Cell Activation | SMAD3; EGFR; FAS; CSF1; NFKB2; BCL2; MYH9; |
| | IGF1R; IL6R; RELA; TLR4; PDGFRB; TNF; RELB; IL8; |
| | PDGFRA; NFKB1; TGFBR1; SMAD4; VEGFA; BAX; |
| | IL1R1; CCL2; HGF; MMP1; STAT1; IL6; CTGF; MMP9 |
| PPAR Signaling | EP300; INS; TRAF6; PPARA; RXRA; MAPK1; IKBKB; |
| | NCOR2; FOS; NFKB2; MAP3K14; STAT5B; MAPK3; |
| | NRIP1; KRAS; PPARG; RELA; STAT5A; TRAF2; |
| | PPARGC1A; PDGFRB; TNF; INSR; RAF1; IKBKG; |
| | RELB; MAP3K7; CREBBP; MAP2K2; CHUK; PDGFRA; |
| | MAP2K1; NFKB1; JUN; IL1R1; HSP90AA1 |
| Fc Epsilon RI Signaling | PRKCE; RAC1; PRKCZ; LYN; MAPK1; RAC2; PTPN11; |
| | AKT2; PIK3CA; SYK; PRKCI; PIK3CB; PIK3C3; MAPK8; |
| | PRKD1; MAPK3; MAPK10; KRAS; MAPK13; PRKCD; |
| | MAPK9; PIK3C2A; BTK; MAPK14; TNF; RAF1; FYN; |
| | MAP2K2; AKT1; PIK3R1; PDPK1; MAP2K1; AKT3; |
| | VAV3; PRKCA |
| G-Protein Coupled | PRKCE; RAP1A; RGS16; MAPK1; GNAS; AKT2; IKBKB; |
| Receptor Signaling | PIK3CA; CREB1; GNAQ; NFKB2; CAMK2A; PIK3CB; |
| | PIK3C3; MAPK3; KRAS; RELA; SRC; PIK3C2A; RAF1; |
| | IKBKG; RELB; FYN; MAP2K2; AKT1; PIK3R1; CHUK; |
| | PDPK1; STAT3; MAP2K1; NFKB1; BRAF; ATF4; AKT3; |
| | PRKCA |
| Inositol Phosphate | PRKCE; IRAK1; PRKAA2; EIF2AK2; PTEN; GRK6; |
| Metabolism | MAPK1; PLK1; AKT2; PIK3CA; CDK8; PIK3CB; PIK3C3; |
| | MAPK8; MAPK3; PRKCD; PRKAA1; MAPK9; CDK2; |
| | PIM1; PIK3C2A; DYRK1A; MAP2K2; PIP5K1A; PIK3R1; |
| | MAP2K1; PAK3; ATM; TTK; CSNK1A1; BRAF; SGK |
| PDGF Signaling | EIF2AK2; ELK1; ABL2; MAPK1; PIK3CA; FOS; PIK3CB; |
| | PIK3C3; MAPK8; CAV1; ABL1; MAPK3; KRAS; SRC; |
| | PIK3C2A; PDGFRB; RAF1; MAP2K2; JAK1; JAK2; |
| | PIK3R1; PDGFRA; STAT3; SPHK1; MAP2K1; MYC; |
| | JUN; CRKL; PRKCA; SRF; STAT1; SPHK2 |
| VEGF Signaling | ACTN4; ROCK1; KDR; FLT1; ROCK2; MAPK1; PGF; |
| | AKT2; PIK3CA; ARNT; PTK2; BCL2; PIK3CB; PIK3C3; |
| | BCL2L1; MAPK3; KRAS; HIF1A; NOS3; PIK3C2A; PXN; |
| | RAF1; MAP2K2; ELAVL1; AKT1; PIK3R1; MAP2K1; SFN; |
| | VEGFA; AKT3; FOXO1; PRKCA |
| Natural Killer Cell Signaling | PRKCE; RAC1; PRKCZ; MAPK1; RAC2; PTPN11; |
| | KIR2DL3; AKT2; PIK3CA; SYK; PRKCI; PIK3CB; |
| | PIK3C3; PRKD1; MAPK3; KRAS; PRKCD; PTPN6; |
| | PIK3C2A; LCK; RAF1; FYN; MAP2K2; PAK4; AKT1; |
| | PIK3R1; MAP2K1; PAK3; AKT3; VAV3; PRKCA |
| Cell Cycle; G1/S | HDAC4; SMAD3; SUV39H1; HDAC5; CDKN1B; BTRC; |
| Checkpoint Regulation | ATR; ABL1; E2F1; HDAC2; HDAC7A; RB1; HDAC11; |
| | HDAC9; CDK2; E2F2; HDAC3; TP53; CDKN1A; CCND1; |
| | E2F4; ATM; RBL2; SMAD4; CDKN2A; MYC; NRG1; |
| | GSK3B; RBL1; HDAC6 |
| T Cell Receptor Signaling | RAC1; ELK1; MAPK1; IKBKB; CBL; PIK3CA; FOS; |
| | NFKB2; PIK3CB; PIK3C3; MAPK8; MAPK3; KRAS; |
| | RELA; PIK3C2A; BTK; LCK; RAF1; IKBKG; RELB; FYN; |
| | MAP2K2; PIK3R1; CHUK; MAP2K1; NFKB1; ITK; BCL10; |
| | JUN; VAV3 |
| Death Receptor Signaling | CRADD; HSPB1; BID; BIRC4; TBK1; IKBKB; FADD; |
| | FAS; NFKB2; BCL2; MAP3K14; MAPK8; RIPK1; CASP8; |
| | DAXX; TNFRSF10B; RELA; TRAF2; TNF; IKBKG; RELB; |
| | CASP9; CHUK; APAF1; NFKB1; CASP2; BIRC2; CASP3; |
| | BIRC3 |
| FGF Signaling | RAC1; FGFR1; MET; MAPKAPK2; MAPK1; PTPN11; |
| | AKT2; PIK3CA; CREB1; PIK3CB; PIK3C3; MAPK8; |
| | MAPK3; MAPK13; PTPN6; PIK3C2A; MAPK14; RAF1; |
| | AKT1; PIK3R1; STAT3; MAP2K1; FGFR4; CRKL; ATF4; |
| | AKT3; PRKCA; HGF |
| GM-CSF Signaling | LYN; ELK1; MAPK1; PTPN11; AKT2; PIK3CA; CAMK2A; |
| | STAT5B; PIK3CB; PIK3C3; GNB2L1; BCL2L1; MAPK3; |
| | ETS1; KRAS; RUNX1; PIM1; PIK3C2A; RAF1; MAP2K2; |
| | AKT1; JAK2; PIK3R1; STAT3; MAP2K1; CCND1; AKT3; |
| | STAT1 |
| Amyotrophic Lateral | BID; IGF1; RAC1; BIRC4; PGF; CAPNS1; CAPN2; |
| Sclerosis Signaling | PIK3CA; BCL2; PIK3CB; PIK3C3; BCL2L1; CAPN1; |
| | PIK3C2A; TP53; CASP9; PIK3R1; RAB5A; CASP1; |
| | APAF1; VEGFA; BIRC2; BAX; AKT3; CASP3; BIRC3 |
| JAK/Stat Signaling | PTPN1; MAPK1; PTPN11; AKT2; PIK3CA; STAT5B; |
| | PIK3CB; PIK3C3; MAPK3; KRAS; SOCS1; STAT5A; |
| | PTPN6; PIK3C2A; RAF1; CDKN1A; MAP2K2; JAK1; |
| | AKT1; JAK2; PIK3R1; STAT3; MAP2K1; FRAP1; AKT3; |
| | STAT1 |
| Nicotinate and Nicotinamide | PRKCE; IRAK1; PRKAA2; EIF2AK2; GRK6; MAPK1; |
| Metabolism | PLK1; AKT2; CDK8; MAPK8; MAPK3; PRKCD; PRKAA1; |
| | PBEF1; MAPK9; CDK2; PIM1; DYRK1A; MAP2K2; |
| | MAP2K1; PAK3; NT5E; TTK; CSNK1A1; BRAF; SGK |
| Chemokine Signaling | CXCR4; ROCK2; MAPK1; PTK2; FOS; CFL1; GNAQ; |
| | CAMK2A; CXCL12; MAPK8; MAPK3; KRAS; MAPK13; |
| | RHOA; CCR3; SRC; PPP1CC; MAPK14; NOX1; RAF1; |
| | MAP2K2; MAP2K1; JUN; CCL2; PRKCA |
| IL-2 Signaling | ELK1; MAPK1; PTPN11; AKT2; PIK3CA; SYK; FOS; |
| | STAT5B; PIK3CB; PIK3C3; MAPK8; MAPK3; KRAS; |
| | SOCS1; STAT5A; PIK3C2A; LCK; RAF1; MAP2K2; |
| | JAK1; AKT1; PIK3R1; MAP2K1; JUN; AKT3 |
| Synaptic Long Term | PRKCE; IGF1; PRKCZ; PRDX6; LYN; MAPK1; GNAS; |
| Depression | PRKCI; GNAQ; PPP2R1A; IGF1R; PRKD1; MAPK3; |
| | KRAS; GRN; PRKCD; NOS3; NOS2A; PPP2CA; |
| | YWHAZ; RAF1; MAP2K2; PPP2R5C; MAP2K1; PRKCA |
| Estrogen Receptor | TAF4B; EP300; CARM1; PCAF; MAPK1; NCOR2; |
| Signaling | SMARCA4; MAPK3; NRIP1; KRAS; SRC; NR3C1; |
| | HDAC3; PPARGC1A; RBM9; NCOA3; RAF1; CREBBP; |
| | MAP2K2; NCOA2; MAP2K1; PRKDC; ESR1; ESR2 |
| Protein Ubiquitination | TRAF6; SMURF1; BIRC4; BRCA1; UCHL1; NEDD4; |
| Pathway | CBL; UBE21; BTRC; HSPA5; USP7; USP10; FBXW7; |
| | USP9X; STUB1; USP22; B2M; BIRC2; PARK2; USP8; |
| | USP1; VHL; HSP90AA1; BIRC3 |
| IL-10 Signaling | TRAF6; CCR1; ELK1; IKBKB; SP1; FOS; NFKB2; |
| | MAP3K14; MAPK8; MAPK13; RELA; MAPK14; TNF; |
| | IKBKG; RELB; MAP3K7; JAK1; CHUK; STAT3; NFKB1; |
| | JUN; IL1R1; IL6 |
| VDR/RXR Activation | PRKCE; EP300; PRKCZ; RXRA; GADD45A; HES1; |
| | NCOR2; SP1; PRKCI; CDKN1B; PRKD1; PRKCD; |
| | RUNX2; KLF4; YY1; NCOA3; CDKN1A; NCOA2; SPP1; |
| | LRP5; CEBPB; FOXO1; PRKCA |
| TGF-beta Signaling | EP300; SMAD2; SMURF1; MAPK1; SMAD3; SMAD1; |
| | FOS; MAPK8; MAPK3; KRAS; MAPK9; RUNX2; |
| | SERPINE1; RAF1; MAP3K7; CREBBP; MAP2K2; |
| | MAP2K1; TGFBR1; SMAD4; JUN; SMAD5 |
| Toll-like Receptor Signaling | IRAK1; EIF2AK2; MYD88; TRAF6; PPARA; ELK1; |
| | IKBKB; FOS; NFKB2; MAP3K14; MAPK8; MAPK13; |
| | RELA; TLR4; MAPK14; IKBKG; RELB; MAP3K7; CHUK; |
| | NFKB1; TLR2; JUN |
| p38 MAPK Signaling | HSPB1; IRAK1; TRAF6; MAPKAPK2; ELK1; FADD; FAS; |
| | CREB1; DDIT3; RPS6KA4; DAXX; MAPK13; TRAF2; |
| | MAPK14; TNF; MAP3K7; TGFBR1; MYC; ATF4; IL1R1; |
| | SRF; STAT1 |
| Neurotrophin/TRK Signaling | NTRK2; MAPK1; PTPN11; PIK3CA; CREB1; FOS; |
| | PIK3CB; PIK3C3; MAPK8; MAPK3; KRAS; PIK3C2A; |
| | RAF1; MAP2K2; AKT1; PIK3R1; PDPK1; MAP2K1; |
| | CDC42; JUN; ATF4 |
| FXR/RXR Activation | INS; PPARA; FASN; RXRA; AKT2; SDC1; MAPK8; |
| | APOB; MAPK10; PPARG; MTTP; MAPK9; PPARGC1A; |
| | TNF; CREBBP; AKT1; SREBF1; FGFR4; AKT3; FOXO1 |
| Synaptic Long Term | PRKCE; RAP1A; EP300; PRKCZ; MAPK1; CREB1; |
| Potentiation | PRKCI; GNAQ; CAMK2A; PRKD1; MAPK3; KRAS; |
| | PRKCD; PPP1CC; RAF1; CREBBP; MAP2K2; MAP2K1; |
| | ATF4; PRKCA |
| Calcium Signaling | RAP1A; EP300; HDAC4; MAPK1; HDAC5; CREB1; |
| | CAMK2A; MYH9; MAPK3; HDAC2; HDAC7A; HDAC11; |
| | HDAC9; HDAC3; CREBBP; CALR; CAMKK2; ATF4; |
| | HDAC6 |
| EGF Signaling | ELK1; MAPK1; EGFR; PIK3CA; FOS; PIK3CB; PIK3C3; |
| | MAPK8; MAPK3; PIK3C2A; RAF1; JAK1; PIK3R1; |
| | STAT3; MAP2K1; JUN; PRKCA; SRF; STAT1 |
| Hypoxia Signaling in the | EDN1; PTEN; EP300; NQO1; UBE2I; CREB1; ARNT; |
| Cardiovascular System | HIF1A; SLC2A4; NOS3; TP53; LDHA; AKT1; ATM; |
| | VEGFA; JUN; ATF4; VHL; HSP90AA1 |
| LPS/IL-1 Mediated Inhibition | IRAK1; MYD88; TRAF6; PPARA; RXRA; ABCA1; |
| of RXR Function | MAPK8; ALDH1A1; GSTP1; MAPK9; ABCB1; TRAF2; |
| | TLR4; TNF; MAP3K7; NR1H2; SREBF1; JUN; IL1R1 |
| LXR/RXR Activation | FASN; RXRA; NCOR2; ABCA1; NFKB2; IRF3; RELA; |
| | NOS2A; TLR4; TNF; RELB; LDLR; NR1H2; NFKB1; |
| | SREBF1; IL1R1; CCL2; IL6; MMP9 |
| Amyloid Processing | PRKCE; CSNK1E; MAPK1; CAPNS1; AKT2; CAPN2; |
| | CAPN1; MAPK3; MAPK13; MAPT; MAPK14; AKT1; |
| | PSEN1; CSNK1A1; GSK3B; AKT3; APP |
| IL-4 Signaling | AKT2; PIK3CA; PIK3CB; PIK3C3; IRS1; KRAS; SOCS1; |
| | PTPN6; NR3C1; PIK3C2A; JAK1; AKT1; JAK2; PIK3R1; |
| | FRAP1; AKT3; RPS6KB1 |
| Cell Cycle; G2/M DNA | EP300; PCAF; BRCA1; GADD45A; PLK1; BTRC; |
| Damage Checkpoint | CHEK1; ATR; CHEK2; YWHAZ; TP53; CDKN1A; |
| Regulation | PRKDC; ATM; SFN; CDKN2A |
| Nitric Oxide Signaling in the | KDR; FLT1; PGF; AKT2; PIK3CA; PIK3CB; PIK3C3; |
| Cardiovascular System | CAV1; PRKCD; NOS3; PIK3C2A; AKT1; PIK3R1; |
| | VEGFA; AKT3; HSP90AA1 |
| Purine Metabolism | NME2; SMARCA4; MYH9; RRM2; ADAR; EIF2AK4; |
| | PKM2; ENTPD1; RAD51; RRM2B; TJP2; RAD51C; |
| | NT5E; POLD1; NME1 |
| CAMP-mediated Signaling | RAP1A; MAPK1; GNAS; CREB1; CAMK2A; MAPK3; |
| | SRC; RAF1; MAP2K2; STAT3; MAP2K1; BRAF; ATF4 |
| Mitochondrial Dysfunction | SOD2; MAPK8; CASP8; MAPK10; MAPK9; CASP9; |
| Notch Signaling | PARK7; PSEN1; PARK2; APP; CASP3 |
| | HES1; JAG1; NUMB; NOTCH4; ADAM17; NOTCH2; |
| | PSEN1; NOTCH3; NOTCH1; DLL4 |
| Endoplasmic Reticulum | HSPA5; MAPK8; XBP1; TRAF2; ATF6; CASP9; ATF4; |
| Stress Pathway | EIF2AK3; CASP3 |
| Pyrimidine Metabolism | NME2; AICDA; RRM2; EIF2AK4; ENTPD1; RRM2B; |
| | NT5E; POLD1; NME1 |
| Parkinson's Signaling | UCHL1; MAPK8; MAPK13; MAPK14; CASP9; PARK7; |
| | PARK2; CASP3 |
| Cardiac & Beta Adrenergic | GNAS; GNAQ; PPP2R1A; GNB2L1; PPP2CA; PPP1CC; |
| Signaling | PPP2R5C |
| Glycolysis/Gluconeogenesis | HK2; GCK; GPI; ALDH1A1; PKM2; LDHA; HK1 |
| Interferon Signaling | IRF1; SOCS1; JAK1; JAK2; IFITM1; STAT1; IFIT3 |
| Sonic Hedgehog Signaling | ARRB2; SMO; GLI2; DYRK1A; GLI1; GSK3B; DYRK1B |
| Glycerophospholipid | PLD1; GRN; GPAM; YWHAZ; SPHK1; SPHK2 |
| Metabolism | |
| Phospholipid Degradation | PRDX6; PLD1; GRN; YWHAZ; SPHK1; SPHK2 |
| Tryptophan Metabolism | SIAH2; PRMT5; NEDD4; ALDH1A1; CYP1B1; SIAH1 |
| Lysine Degradation | SUV39H1; EHMT2; NSD1; SETD7; PPP2R5C |
| Nucleotide Excision Repair | ERCC5; ERCC4; XPA; XPC; ERCC1 |
| Pathway | |
| Starch and Sucrose | UCHL1; HK2; GCK; GPI; HK1 |
| Metabolism | |
| Aminosugars Metabolism | NQO1; HK2; GCK; HK1 |
| Arachidonic Acid | PRDX6; GRN; YWHAZ; CYP1B1 |
| Metabolism | |
| Circadian Rhythm Signaling | CSNK1E; CREB1; ATF4; NR1D1 |
| Coagulation System | BDKRB1; F2R; SERPINE1; F3 |
| Dopamine Receptor | PPP2R1A; PPP2CA; PPP1CC; PPP2R5C |
| Signaling | |
| Glutathione Metabolism | IDH2; GSTP1; ANPEP; IDH1 |
| Glycerolipid Metabolism | ALDH1A1; GPAM; SPHK1; SPHK2 |
| Linoleic Acid Metabolism | PRDX6; GRN; YWHAZ; CYP1B1 |
| Methionine Metabolism | DNMT1; DNMT3B; AHCY; DNMT3A |
| Pyruvate Metabolism | GLO1; ALDH1A1; PKM2; LDHA |
| Arginine and Proline | ALDH1A1; NOS3; NOS2A |
| Metabolism | |
| Eicosanoid Signaling | PRDX6; GRN; YWHAZ |
| Fructose and Mannose | HK2; GCK; HK1 |
| Metabolism | |
| Galactose Metabolism | HK2; GCK; HK1 |
| Stilbene, Coumarine and | PRDX6; PRDX1; TYR |
| Lignin Biosynthesis | |
| Antigen Presentation | CALR; B2M |
| Pathway | |
| Biosynthesis of Steroids | NQO1; DHCR7 |
| Butanoate Metabolism | ALDH1A1; NLGN1 |
| Citrate Cycle | IDH2; IDH1 |
| Fatty Acid Metabolism | ALDH1A1; CYP1B1 |
| Glycerophospholipid | PRDX6; CHKA |
| Metabolism | |
| Histidine Metabolism | PRMT5; ALDH1A1 |
| Inositol Metabolism | ERO1L; APEX1 |
| Metabolism of Xenobiotics | GSTP1; CYP1B1 |
| by Cytochrome p450 | |
| Methane Metabolism | PRDX6; PRDX1 |
| Phenylalanine Metabolism | PRDX6; PRDX1 |
| Propanoate Metabolism | ALDH1A1; LDHA |
| Selenoamino Acid | PRMT5; AHCY |
| Metabolism | |
| Sphingolipid Metabolism | SPHK1; SPHK2 |
| Aminophosphonate | PRMT5 |
| Metabolism | |
| Androgen and Estrogen | PRMT5 |
| Metabolism | |
| Ascorbate and Aldarate | ALDH1A1 |
| Metabolism | |
| Bile Acid Biosynthesis | ALDH1A1 |
| Cysteine Metabolism | LDHA |
| Fatty Acid Biosynthesis | FASN |
| Glutamate Receptor | GNB2L1 |
| Signaling | |
| NRF2-mediated Oxidative | PRDX1 |
| Stress Response | |
| Pentose Phosphate | GPI |
| Pathway | |
| Pentose and Glucuronate | UCHL1 |
| Interconversions | |
| Retinol Metabolism | ALDH1A1 |
| Riboflavin Metabolism | TYR |
| Tyrosine Metabolism | PRMT5, TYR |
| Ubiquinone Biosynthesis | PRMT5 |
| Valine, Leucine and | ALDH1A1 |
| Isoleucine Degradation | |
| Glycine, Serine and | CHKA |
| Threonine Metabolism | |
| Lysine Degradation | ALDH1A1 |
| Pain/Taste | TRPM5; TRPA1 |
| Pain | TRPM7; TRPC5; TRPC6; TRPC1; Cnr1; cnr2; Grk2; |
| | Trpa1; Pomc; Cgrp; Crf; Pka; Era; Nr2b; TRPM5; Prkaca; |
| | Prkacb; Prkar1a; Prkar2a |
| Mitochondrial Function | AIF; CytC; SMAC (Diablo); Aifm-1; Aifm-2 |
| Developmental Neurology | BMP-4; Chordin (Chrd); Noggin (Nog); WNT (Wnt2; |
| | Wnt2b; Wnt3a; Wnt4; Wnt5a; Wnt6; Wnt7b; Wnt8b; |
| | Wnt9a; Wnt9b; Wnt10a; Wnt10b; Wnt16); beta-catenin; |
| | Dkk-1; Frizzled related proteins; Otx-2; Gbx2; FGF-8; |
| | Reelin; Dab1; unc-86 (Pou4fl or Brn3a); Numb; Reln |

[0656] In an aspect, the invention provides a method of individualized or personalized treatment of a genetic disease in a subject in need of such treatment comprising: (a) introducing one or more mutations ex vivo in a tissue, organ or a cell line, or in vivo in a transgenic non-human mammal, comprising delivering to cell(s) of the tissue, organ, cell or mammal a composition comprising the particle delivery system or the delivery system or the virus particle of any one of the above embodiment or the cell of any one of the above embodiment, wherein the specific mutations or precise sequence substitutions are or have been correlated to the genetic disease; (b) testing treatment(s) for the genetic disease on the cells to which the vector has been delivered that have the specific mutations or precise sequence substitutions correlated to the genetic disease; and (c) treating the subject based on results from the testing of treatment(s) of step (b).

### Infectious Diseases

[0657] In one embodiment, the composition, system(s), or component(s) thereof can be used to diagnose, prognose, treat, and/or prevent an infectious disease caused by a microorganism, such as bacteria, virus, fungi, parasites, or combinations thereof.

[0658] In one embodiment, the system(s) or component(s) thereof can be capable of targeting specific microorganism within a mixed population. Exemplary methods of such techniques are described in e.g., Gomaa A A, Klumpe H E, Luo M L, Selle K, Barrangou R, Beisel C L. 2014. Programmable removal of bacterial strains by use of genome-targeting composition, systems, mBio 5:e00928-13; Citorik R J, Mimee M, Lu T K. 2014. Sequence-specific antimicrobials using efficiently delivered RNA-guided nucleases. Nat Biotechnol 32:1141-1145, the teachings of which can be adapted for use with the compositions, systems, and components thereof described herein.

[0659] In one embodiment, the composition, system(s), and/or components thereof can be capable of targeting pathogenic and/or drug-resistant microorganisms, such as bacteria, virus, parasites, and fungi. In one embodiment, the composition, system(s), and/or components thereof can be capable of targeting and modifying one or more polynucleotides in a pathogenic microorganism such that the microorganism is less virulent, killed, inhibited, or is otherwise rendered incapable of causing disease and/or infecting and/or replicating in a host cell.

[0660] In one embodiment, the pathogenic bacteria that can be targeted and/or modified by the composition, system, (s) and/or component(s) thereof described herein include, but are not limited to, those of the genus Actinomyces (e.g., A. israelii), Bacillus (e.g., B. anthracis, B. cereus), Bactereoides (e.g., B. fragilis), Bartonella (B. henselae, B. quintana), Bordetella (B. pertussis), Borrelia (e.g., B. burgdorferi, B. garinii, B. afzelii, and B. recurreentis), Brucella (e.g., B. abortus, B. canis, B. melitensis, and B. suis), Campylobacter (e.g., C. jejuni), Chlamydia (e.g., C. pneumoniae and C. trachomatis), Chlamydophila (e.g., C. psittaci), Clostridium (e.g., C. botulinum, C. difficile, C. perfringens. C. tetani), Corynebacterium (e.g., C. diptheriae), Enterococcus (e.g., E. Faecalis, E. faecium), Ehrlichia (E. canis and E. chaffensis) Escherichia (e.g., E. coli), Francisella (e.g., F. tularensis), Haemophilus (e.g., H. influenzae), Helicobacter (H. pylori), Klebsiella (E.g., K. pneumoniae), Legionella (e.g., L. pneumophila), Leptospira (e.g., L. interrogans, L. santarosai, L. weilii, L. noguchii), Listereia (e.g., L. monocytogeenes), Mycobacterium (e.g., M. leprae, M. tuberculosis, M. ulcerans), Mycoplasma (M. pneumoniae), Neisseria (N. gonorrhoeae and N. menigitidis), Nocardia (e.g., N. asteeroides), Pseudomonas (P. aeruginosa), Rickettsia (R. rickettsia), Salmonella (S. typhi and S. typhimurium), Shigella (S. sonnei and S. dysenteriae), Staphylococcus (S. aureus, S. epidermidis, and S. saprophyticus), Streeptococcus (S. agalactiaee. S. pneumoniae. S. pyogenes), Treponema (T. pallidum), Ureeaplasma (e.g., (J. urealyticum), Vibrio (e.g., V. cholerae), Yersinia (e.g., Y. pestis, Y. enteerocolitica, and Y. pseudotuberculosis).

[0661] In one embodiment, the pathogenic virus that can be targeted and/or modified by the composition, system(s), and/or component(s) thereof described herein include, but are not limited to, a double-stranded DNA virus, a partly double-stranded DNA virus, a single-stranded DNA virus, a positive single-stranded RNA virus, a negative single-stranded RNA virus, or a double stranded RNA virus. In one embodiment, the pathogenic virus can be from the family Adenoviridae (e.g., Adenovirus), Herpeesviridae (e.g., Herpes simplex, type 1, Herpes simplex, type 2, Varicella-zoster virus, Epstein-Barr virus, Human cytomegalovirus, Human herpesvirus, type 8), Papillomaviridae (e.g., Human papillomavirus), Polyomaviridae (e.g., BK virus, JC virus), Poxviridae (e.g., smallpox), Hepadnaviridae (e.g., Hepatitis B), Parvoviridae (e.g., Parvovirus B19), Astroviridae (e.g., Human astrovirus), Caliciviridae (e.g., Norwalk virus), Picornaviridae (e.g., coxsackievirus, hepatitis A virus, poliovirus, rhinovirus), Coronaviridae (e.g., Severe acute respiratory syndrome-related coronavirus, strains: Severe acute respiratory syndrome virus, Severe acute respiratory syndrome coronavirus 2 (COVID-19)), Flaviviridae (e.g., Hepatitis C virus, yellow fever virus, dengue virus, West Nile virus, TBE virus), Togaviridae (e.g., Rubella virus), Hepeviridae (e.g., Hepatitis E virus), Retroviridae (Human immunodeficiency virus (HIV)), Orthomyxoviridae (e.g., Influenza virus), Arenaviridae (e.g., Lassa virus), Bunyaviridae (e.g., Crimean-Congo hemorrhagic fever virus, Hantaan virus), Filoviridae (e.g., Ebola virus and Marburg virus), Paramyxoviridae (e.g., Measles virus, Mumps virus, Parainfluenza virus, Respiratory syncytial virus), Rhabdoviridae (Rabies virus), Hepatits D virus, Reoviridae (e.g., Rotavirus, Orbivirus, Coltivirus, Banna virus).

[0662] In one embodiment, the pathogenic fungi that can be targeted and/or modified by the composition, system, (s) and/or component(s) thereof described herein include, but are not limited to, those of the genus Candida (e.g., C. albicans), Aspergillus (e.g., A. fumigatus, A. flavus, A. clavatus), Cryptococcus (e.g., C. neoformans, C. gattii), Histoplasma (H. capsulatum), Pneumocystis (e.g., P. jiroveecii), Stachybotrys (e.g., S. chartarum).

[0663] In one embodiment, the pathogenic parasites that can be targeted and/or modified by the composition, system(s), and/or component(s) thereof described herein include, but are not limited to, protozoa, helminths, and ectoparasites. In one embodiment, the pathogenic protozoa that can be targeted and/or modified by the composition, system, (s) and/or component(s) thereof described herein include, but are not limited to, those from the groups Sarcodina (e.g., ameba such as Entamoeba), Mastigophora (e.g., flagellates such as Giardia and Leishmania), Cilophora (e.g., ciliates such as Balantidum), and sporozoa (e.g., plasmodium and cryptosporidium). In one embodiment, the pathogenic helminths that can be targeted and/or modified by the composition, system(s), and/or component(s) thereof described herein include, but are not limited to, flatworms (platyhelminths), thorny-headed worms (acanthoceephalins), and roundworms (nematodes). In one embodiment, the pathogenic ectoparasites that can be targeted and/or modified by the composition, system(s), and/or component(s) thereof described herein include, but are not limited to, ticks, fleas, lice, and mites.

[0664] In one embodiment, the pathogenic parasite that can be targeted and/or modified by the composition, system, (s) and/or component(s) thereof described herein include, but are not limited to, Acanthamoeba spp., Balamuthia mandrillaris, Babesiosis spp. (e.g., Babesia B. divergens, B. bigemina, B. equi, B. microfti, B. duncani), Balantidiasis spp. (e.g., Balantidium coli), Blastocystis spp., Cryptosporidium spp., Cyclosporiasis spp. (e.g., Cyclospora cayetanensis), Dientamoebiasis spp. (e.g., Dientamoeba fragilis), Amoebiasis spp. (e.g., Entamoeba histolytica), Giardiasis spp. (e.g., Giardia lamblia), Isosporiasis spp. (e.g., Isospora belli), Leishmania spp., Naegleria spp. (e.g., Naegleria fowleri), Plasmodium spp. (e.g., Plasmodium falciparum, Plasmodium vivax, Plasmodium ovale curtisi, Plasmodium ovale wallikeri, Plasmodium malariae, Plasmodium knowlesi), Rhinosporidiosis spp. (e.g., Rhinosporidium seeberi), Sarcocystosis spp. (e.g., Sarcocystis bovihominis, Sarcocystis suihominis), Toxoplasma spp. (e.g., Toxoplasma gondii), Trichomonas spp. (e.g., Trichomonas vaginalis), Trypanosoma spp. (e.g., Trypanosoma brucei), Trypanosoma spp. (e.g., Trypanosoma cruzi), Tapeworm (e.g., Cestoda, Taenia multiceps, Taenia saginata, Taenia solium), Diphyllobothrium latum spp., Echinococcus spp. (e.g., Echinococcus granulosus, Echinococcus multilocularis, E. vogeli, E. oligarthrus), Hymenolepis spp. (e.g., Hymenolepis nana, Hymenolepis diminuta), Bertiella spp. (e.g., Bertiella mucronata, Bertiella studeri), Spirometra (e.g., Spirometra erinaceieuropaei), Clonorchis spp. (e.g., Clonorchis sinensis; Clonorchis viverrini), Dicrocoelium spp. (e.g., Dicrocoelium dendriticum), Fasciola spp. (e.g., Fasciola hepatica, Fasciola gigantica), Fasciolopsis spp. (e.g., Fasciolopsis buski), Metagonimus spp. (e.g., Metagonimus yokogawai), Metorchis spp. (e.g., Metorchis conjunctus), Opisthorchis spp. (e.g., Opisthorchis viverrini, Opisthorchis felineus), Clonorchis spp. (e.g., Clonorchis sinensis), Paragonimus spp. (e.g., Paragonimus westermani; Paragonimus africanus; Paragonimus caliensis; Paragonimus kellicotti: Paragonimus skrjabini; Paragonimus uterobilateralis), Schistosoma sp., Schistosoma spp. (e.g., Schistosoma mansoni, Schistosoma haematobium, Schistosoma japonicum, Schistosoma mekongi, and Schistosoma intercalatum), Echinostoma spp. (e.g., E. echinatum), Trichobilharzia spp. (e.g., Trichobilharzia regent), Ancylostoma spp. (e.g., Ancylostoma duodenale), Necator spp. (e.g., Necator americamus), Angiostrongylus spp., Anisakis spp., Ascaris spp. (e.g., Ascaris lumbricoides), Baylisascaris spp. (e.g., Baylisascaris procyonis), Brugia spp. (e.g., Brugia malayi, Brugia timori), Dioctophyme spp. (e.g., Dioctophyme renale), Dracunculus spp. (e.g., Dracunculus medinensis), Enterobius spp. (e.g., Enterobius vermicularis, Enterobius gregorii), Gnathostoma spp. (e.g., Gnathostoma spinigerum, Gnathostoma hispidum), Halicephalobus spp. (e.g., Halicephalobus gingivalis), Loa loa spp. (e.g., Loa loa filaria), Mansonella spp. (e.g., Mansonella streptocerca), Onchocerca spp. (e.g., Onchocerca volvulus), Strongyloides spp. (e.g., Strongyloides stercoralis), Thelazia spp. (e.g., Thelazia californiensis, Thelazia callipaeda), Toxocara spp. (e.g., Toxocara canis, Toxocara cati, Toxascaris leonine), Trichinella spp. (e.g., Trichinella spiralis, Trichinella britovi, Trichinella nelsoni, Trichinella nativa), Trichuris spp. (e.g., Trichuris trichiura, Trichuris vulpis), Wuchereria spp. (e.g., Wuchereria bancrofti), Dermatobia spp. (e.g., Dermatobia hominis), Tunga spp. (e.g., Tunga penetrans), Cochliomyia spp. (e.g., Cochliomyia hominivorax), Linguatula spp. (e.g., Linguatula serrata), Archiacanthocephala sp., Moniliformis sp. (e.g., Moniliformis moniliformis), Pediculus spp. (e.g., Pediculus humanus capitis, Pediculus humanus humanus), Pthirus spp. (e.g., Pthirus pubis), Arachnida spp. (e.g., Trombiculidae, Ixodidae, Argaside), Siphonaptera spp (e.g., Siphonaptera: Pulicinae), Cimicidae spp. (e.g., Cimex lectularius and Cimex hemipterus), Diptera spp., Demodex spp. (e.g., Demodex folliculorum brevis canis), Sarcoptes spp. (e.g., Sarcoptes scabiei), Dermanyssus spp. (e.g., Dermanyssus gallinae), Ornithonyssus spp. (e.g., Ornithonyssus sylviarum, Ornithonyssus bursa, Ornithonyssus bacoti), Laelaps spp. (e.g., Laelaps echidnina), Liponyssoides spp. (e.g., Liponyssoides sanguineus).

[0665] In one embodiment the gene targets can be any of those as set forth in Table 1 of Strich and Chertow, 2019. J. Clin. Microbio. 57:4e01307-18, which is incorporated herein as if expressed in its entirety herein.

[0666] In one embodiment, the method can include delivering a composition, system, and/or component thereof to a pathogenic organism described herein, allowing the composition, system, and/or component thereof to specifically bind and modify one or more targets in the pathogenic organism, whereby the modification kills, inhibits, reduces the pathogenicity of the pathogenic organism, or otherwise renders the pathogenic organism non-pathogenic. In one embodiment, delivery of the composition, system, occurs in vivo (i.e., in the subject being treated). In one embodiment occurs by an intermediary, such as microorganism or phage that is non-pathogenic to the subject but is capable of transferring polynucleotides and/or infecting the pathogenic microorganism. In one embodiment, the intermediary microorganism can be an engineered bacteria, virus, or phage that contains the composition, system(s), and/or component(s) thereof and/or vectors and/or vector systems. The method can include administering an intermediary microorganism containing the composition, system(s), and/or component(s) thereof and/or vectors and/or vector systems to the subject to be treated. The intermediary microorganism can then produce the compositions and/or component thereof or transfer a composition, system, polynucleotide to the pathogenic organism. In embodiments, where the compositions and/or component thereof, vector, or vector system is transferred to the pathogenic microorganism, the composition, system, or component thereof is then produced in the pathogenic microorganism and modifies the pathogenic microorganism such that it is less virulent, killed, inhibited, or is otherwise rendered incapable of causing disease and/or infecting and/or replicating in a host or cell thereof.

[0667] In one embodiment, where the pathogenic microorganism inserts its genetic material into the host cell's genome (e.g., a virus), the composition, system, can be designed such that it modifies the host cell's genome such that the viral DNA or cDNA cannot be replicated by the host cell's machinery into a functional virus. In one embodiment, where the pathogenic microorganism inserts its genetic material into the host cell's genome (e.g., a virus), the composition, system, can be designed such that it modifies the host cell's genome such that the viral DNA or cDNA is deleted from the host cell's genome.

[0668] It will be appreciated that inhibiting or killing the pathogenic microorganism, the disease and/or condition that its infection causes in the subject can be treated or prevented. Thus, also provided herein are methods of treating and/or preventing one or more diseases or symptoms thereof caused by any one or more pathogenic microorganisms, such as any of those described herein.

### Mitochondrial Diseases

[0669] Some of the most challenging mitochondrial disorders arise from mutations in mitochondrial DNA (mtDNA), a high copy number genome that is maternally inherited. In one embodiment, mtDNA mutations can be modified using a composition, system, described herein. In one embodiment, the mitochondrial disease that can be diagnosed, prognosed, treated, and/or prevented can be MELAS (mitochondrial myopathy encephalopathy, and lactic acidosis and stroke-like episodes), CPEO/PEO (chronic progressive external ophthalmoplegia syndrome/progressive external ophthalmoplegia), KSS (Kearns-Sayre syndrome), MIDD (maternally inherited diabetes and deafness), MERRF (myoclonic epilepsy associated with ragged red fibers), NIDDM (noninsulin-dependent diabetes mellitus), LHON (Leber hereditary optic neuropathy), LS (Leigh Syndrome) an aminoglycoside induced hearing disorder, NARP (neuropathy, ataxia, and pigmentary retinopathy), Extrapyramidal disorder with akinesia-rigidity, psychosis and SNHL, Nonsyndromic hearing loss a cardiomyopathy, an encephalomyopathy, Pearson's syndrome, or a combination thereof.

[0670] In one embodiment, the mtDNA of a subject can be modified in vivo or ex vivo. In one embodiment, where the mtDNA is modified ex vivo, after modification the cells containing the modified mitochondria can be administered back to the subject. In one embodiment, the composition, system, or component thereof can be capable of correcting an mtDNA mutation, or a combination thereof.

[0671] In one embodiment, at least one of the one or more mtDNA mutations is selected from the group consisting of: A3243G, C3256T, T3271C, G1019A, A1304T, A15533G, C1494T, C4467A, T1658C, G12315A, A3421G, A8344G, T8356C, G8363A, A13042T, T3200C, G3242A, A3252G, T3264C, G3316A, T3394C, T14577C, A4833G, G3460A, G9804A, G11778A, G14459A, A14484G, G15257A, T8993C, T8993G, G10197A, G13513A, T1095C, C1494T, A1555G, G1541A, C1634T, A3260G, A4269G, T7587C, A8296G, A8348G, G8363A, T9957C, T9997C, G12192A, C12297T, A14484G, G15059A, duplication of CCCCCTCCCC-tandem (SEQ ID NO: 64,307) repeats at positions 305-314 and/or 956-965, deletion at positions from 8,469-13,447, 4,308-14,874, and/or 4,398-14,822, 961ins/delC, the mitochondrial common deletion (e.g., mtDNA 4,977 bp deletion), and combinations thereof.

[0672] In one embodiment, the mitochondrial mutation can be any mutation as set forth in or as identified by use of one or more bioinformatic tools available at Mitomap available at mitomap.org. Such tools include, but are not limited to, “Variant Search, aka Market Finder”, Find Sequences for Any Haplogroup, aka “Sequence Finder”, “Variant Info”, “POLG Pathogenicity Prediction Server”, “MITOMASTER”, “Allele Search”, “Sequence and Variant Downloads”, “Data Downloads”. MitoMap contains reports of mutations in mtDNA that can be associated with disease and maintains a database of reported mitochondrial DNA Base Substitution Diseases: rRNA/tRNA mutations.

[0673] In one embodiment, the method includes delivering a composition, system, and/or a component thereof to a cell, and more specifically one or more mitochondria in a cell, allowing the composition, system, and/or component thereof to modify one or more target polynucleotides in the cell, and more specifically one or more mitochondria in the cell. The target polynucleotides can correspond to a mutation in the mtDNA, such as any one or more of those described herein. In one embodiment, the modification can alter a function of the mitochondria such that the mitochondria functions normally or at least is/are less dysfunctional as compared to an unmodified mitochondria. Modification can occur in vivo or ex vivo. Where modification is performed ex vivo, cells containing modified mitochondria can be administered to a subject in need thereof in an autologous or allogenic manner.

### Microbiome Modification

[0674] Microbiomes play important roles in health and disease. For example, the gut microbiome can play a role in health by controlling digestion, preventing growth of pathogenic microorganisms and have been suggested to influence mood and emotion. Imbalanced microbiomes can promote disease and are suggested to contribute to weight gain, unregulated blood sugar, high cholesterol, cancer, and other disorders. A healthy microbiome has a series of joint characteristics that can be distinguished from non-healthy individuals; thus detection and identification of the disease-associated microbiome can be used to diagnose and detect disease in an individual. The compositions, systems, and components thereof can be used to screen the microbiome cell population and be used to identify a disease associated microbiome. Cell screening methods utilizing compositions, systems, and components thereof are described elsewhere herein and can be applied to screening a microbiome, such as a gut, skin, vagina, and/or oral microbiome, of a subject.

[0675] In one embodiment, the microbe population of a microbiome in a subject can be modified using a composition, system, and/or component thereof described herein. In one embodiment, the composition, system, and/or component thereof can be used to identify and select one or more cell types in the microbiome and remove them from the microbiome population. Exemplary methods of selecting cells using a composition, system, and/or component thereof are described elsewhere herein. In this way the make-up or microorganism profile of the microbiome can be altered. In one embodiment, the alteration causes a change from a diseased microbiome composition to a healthy microbiome composition. In this way the ratio of one type or species of microorganism to another can be modified, such as going from a diseased ratio to a healthy ratio. In one embodiment, the cells selected are pathogenic microorganisms.

[0676] In one embodiment, the compositions and systems described herein can be used to modify a polynucleotide in a microorganism of a microbiome in a subject. In one embodiment, the microorganism is a pathogenic microorganism. In one embodiment, the microorganism is a commensal and non-pathogenic microorganism. Methods of modifying polynucleotides in a cell in the subject are described elsewhere herein and can be applied to these embodiments.

### Models of Diseases and Conditions

[0677] In an aspect, the invention provides a method of modeling a disease associated with a genomic locus in a eukaryotic organism or a non-human organism comprising manipulation of a target sequence within a coding, non-coding or regulatory element of said genomic locus comprising delivering a non-naturally occurring or engineered composition comprising a viral vector system comprising one or more viral vectors operably encoding a composition for expression thereof, wherein the composition comprises particle delivery system or the delivery system or the virus particle of any one of the above embodiments or the cell of any one of the above embodiment.

[0678] In one aspect, the invention provides a method of generating a model eukaryotic cell that can include one or more a mutated disease genes and/or infectious microorganisms. In one embodiment, a disease gene is any gene associated an increase in the risk of having or developing a disease. In one embodiment, the method includes (a) introducing one or more vectors into a eukaryotic cell, wherein the one or more vectors comprise a composition, system, and/or component thereof and/or a vector or vector system that is capable of driving expression of a composition, system, and/or component thereof including, but not limited to: a nucleic acid component molecule sequence, one or more TnpB polypeptides, and combinations thereof and (b) allowing a composition, system, or complex to bind to one or more target polynucleotides, e.g., to effect cleavage, nicking, or other modification of the target polynucleotide within said disease gene, wherein the composition, system, or complex is composed of one or more TnpB polypeptide complexed with (1) one or more nucleic acid component molecule sequences that is/are hybridized to the target sequence(s) within the target polynucleotide(s), and optionally (2) the nucleic acid component scaffold sequence(s), thereby generating a model eukaryotic cell comprising one or more mutated disease gene(s). Thus, in one embodiment the composition and system, contains nucleic acid molecules for and drives expression of one or more of: a TnpB polypeptide, a nucleic acid component molecule sequence and/or a Homologous Recombination template and/or a stabilizing ligand if the TnpB polypeptide has a destabilization domain. In one embodiment, said cleavage comprises cleaving one or two strands at the location of the target sequence by the TnpB polypeptide. In one embodiment, nicking comprises nicking one or two strands at the location of the target sequence by the TnpB polypeptide. In one embodiment, said cleavage or nicking results in modified transcription of a target polynucleotide. In one embodiment, modification results in decreased transcription of the target polynucleotide. In one embodiment, the method further comprises repairing said cleaved or nicked target polynucleotide by homologous recombination with a recombination template polynucleotide, wherein said repair results in a mutation comprising an insertion, deletion, or substitution of one or more nucleotides of said target polynucleotide. In one embodiment, said mutation results in one or more amino acid changes in a protein expression from a gene comprising the target sequence.

[0679] The disease modeled can be any disease with a genetic or epigenetic component. In one embodiment, the disease modeled can be any as discussed elsewhere herein.

### In Situ Disease Detection

[0680] The compositions, systems, and/or components thereof can be used for diagnostic methods of detection such as in CASFISH (see e.g., Deng et al. 2015. PNAS USA 112(38): 11870-11875), CRISPR-Live FISH (see e.g., Wang et al. 2020. Science; 365(6459): 1301-1305), sm-FISH (Lee and Jefcoate. 2017. Front. Endocrinol. doi.org/10.3389/fendo.2017.00289), sequential FISH CRISPRainbow (Ma et al. Nat Biotechnol, 34 (2016), pp. 528-530), CRISPR-Sirius (Nat Methods, 15 (2018), pp. 928-931), Casilio (Cheng et al. Cell Res, 26 (2016), pp. 254-257), Halo-Tag based genomic loci visualization techniques (e.g., Deng et al. 2015. PNAS USA 112(38): 11870-11875; Knight et al., Science, 350 (2015), pp. 823-826), RNA-aptamer based methods (e.g., Ma et al., J Cell Biol, 214 (2016), pp. 529-537), molecular beacon-based methods (e.g., Zhao et al. Biomaterials, 100 (2016), pp. 172-183; Wu et al. Nucleic Acids Res (2018)), Quantum Dot-based systems (e.g., Ma et al. Anal Chem, 89 (2017), pp. 12896-12901), multiplexed methods (e.g., Ma et al., Proc Natl Acad Sci USA, 112 (2015), pp. 3002-3007; Fu et al. Nat Commun, 7 (2016), p. 11707; Ma et al. Nat Biotechnol, 34 (2016), pp. 528-530; Shao et al. Nucleic Acids Res, 44 (2016), Article e86); Wang et al. Sci Rep, 6 (2016), p. 26857), and other in situ CRISPR-hybridization based methods (e.g., Chen et al. Cell, 155 (2013), pp. 1479-1491; Gu et al. Science, 359 (2018), pp. 1050-1055; Tanebaum et al. Cell, 159 (2014), pp. 635-646; Ye et al. Protein Cell, 8 (2017), pp. 853-855; Chen et al. Nat Commun, 9 (2018), p. 5065; Shao et al. ACS Synth Biol (2017); Fu et al. Nat Commun, 7 (2016), p. 11707; Shao et al. Nucleic Acids Res, 44 (2016), Article e86; Wang et al., Sci Rep, 6 (2016), p. 26857), all of which are incorporated by reference herein as if expressed in their entirety and whose teachings can be adapted to the compositions, systems, and components thereof described herein in view of the description herein.

[0681] In one embodiment, the composition, system, or component thereof can be used in a detection method, such as an in-situ detection method described herein. In one embodiment, the composition, system, or component thereof can include a catalytically inactive TnpB polypeptide described herein and use this system in detection methods such as fluorescence in situ hybridization (FISH) or any other described herein. In one embodiment, the inactivated TnpB polypeptide, which lacks the ability to produce DNA double-strand breaks may be fused with a marker, such as fluorescent protein, such as the enhanced green fluorescent protein (eEGFP) and co-expressed with small nucleic acid component molecules to target pericentric, centric and telomeric repeats in vivo. The dead TnpB polypeptide or system thereof can be used to visualize both repetitive sequences and individual genes in the human genome. Such new applications of labelled dead TnpB polypeptide and compositions, systems, thereof can be important in imaging cells and studying the functional nuclear architecture, especially in cases with a small nucleus volume or complex 3-D structures.

### Cell Selection

[0682] In one embodiment, the compositions, systems, and/or components thereof described herein can be used in a method to screen and/or select cells. In one embodiment, composition, system-based screening/selection method can be used to identify diseased cells in a cell population. In one embodiment, selection of the cells results in a modification in the cells such that the selected cells die. In this way, diseased cells can be identified, and removed from the healthy cell population. In one embodiment, the diseased cells can be a cancer cell, pre-cancerous cell, a virus or other pathogenic organism infected cells, or otherwise abnormal cell. In one embodiment, the modification can impart another detectable change in the cells to be selected (e.g., a functional change and/or genomic barcode) that facilitates selection of the desired cells. In one embodiment a negative selection scheme can be used to obtain a desired cell population. In these embodiments, the cells to be selected against are modified, thus can be removed from the cell population based on their death or identification or sorting based the detectable change imparted on the cells. Thus, in these embodiments, the remaining cells after selection are the desired cell population.

[0683] In one embodiment, a method of selecting one or more cell(s) containing a polynucleotide modification can include: introducing one or more composition, system, (s) and/or components thereof, and/or vectors or vector systems into the cell(s), wherein the composition, system, (s) and/or components thereof, and/or vectors or vector systems contains and/or is capable of expressing one or more of: a TnpB polypeptide, an nucleic acid component sequence, and an recombination template; wherein, for example that which is being expressed is within and expressed in vivo by the composition, system, vector or vector system and/or the recombination template comprises the one or more mutations that abolish TnpB polypeptide cleavage; allowing homologous recombination of the recombination template with the target polynucleotide in the cell(s) to be selected; allowing a composition, system, or complex to bind to a target polynucleotide to effect cleavage of the target polynucleotide within said gene, wherein the AAV-complex comprises the TnpB polypeptide complexed with (1) the nucleic acid component molecule sequence that is hybridized to the target sequence within the target polynucleotide, and (2) the nucleic acid component scaffold, wherein binding of the complex to the target polynucleotide induces cell death or imparts some other detectable change to the cell, thereby allowing one or more cell(s) in which one or more mutations have been introduced to be selected. In one embodiment, the cell to be selected may be a eukaryotic cell. In one embodiment, the cell to be selected may be a prokaryotic cell. Selection of specific cells via the methods herein can be performed without requiring a selection marker or a two-step process that may include a counter-selection system.

### Therapeutic Agent Development

[0684] The compositions, systems, and components thereof described herein can be used to develop TnpB polypeptide-based biologically active agents, such as small molecule therapeutics. Thus, described herein are methods for developing a biologically active agent that modulates a cell function and/or signaling event associated with a disease and/or disease gene. In one embodiment, the method comprises (a) contacting a test compound with a diseased cell and/or a cell containing a disease gene cell; and (b) detecting a change in a readout that is indicative of a reduction or an augmentation of a cell signaling event or other cell functionality associated with said disease or disease gene, thereby developing said biologically active agent that modulates said cell signaling event or other functionality associated with said disease gene. In one embodiment, the diseased cell is a model cell described elsewhere herein. In one embodiment, the diseased cell is a diseased cell isolated from a subject in need of treatment. In one embodiment, the test compound is a small molecule agent. In one embodiment, test compound is a small molecule agent. In one embodiment, the test compound is a biologic molecule agent.

[0685] In one embodiment, the method involves developing a therapeutic based on the composition, system, described herein. In particular embodiments, the therapeutic comprises a TnpB polypeptide and/or a nucleic acid component with a reprogrammable spacer capable of hybridizing to a target sequence of interest. In particular embodiments, the therapeutic is a vector or vector system that can contain a) a first regulatory element operably linked to a nucleotide sequence encoding the TnpB polypeptide; and b) a second regulatory element operably linked to one or more nucleotide sequences encoding one or more nucleic acid molecules comprising a nucleic acid component comprising a reprogrammable spacer sequence, a conserved RNA sequence; wherein components (a) and (b) are located on same or different vectors. In particular embodiments, the biologically active agent is a composition comprising a delivery system operably configured to deliver composition, system, or components thereof, and/or or one or more polynucleotide sequences, vectors, or vector systems containing or encoding said components into a cell and capable of forming a complex with the components of the composition and system herein, and wherein said complex is operable in the cell. In one embodiment, the complex can include the TnpB polypeptide as described herein, nucleic acid component scaffold comprising the guide sequence (reprogrammable spacer sequence), and a conserved nucleotide sequence. In any such compositions, the delivery system can be a yeast system, a lipofection system, a microinjection system, a biolistic system, virosomes, liposomes, immunoliposomes, polycations, lipid: nucleic acid conjugates or artificial virions, or any other system as described herein. In particular embodiments, the delivery is via a particle, a nanoparticle, a lipid or a cell penetrating peptide (CPP).

[0686] Also described herein are methods for developing or designing a composition, system, optionally a composition, system, based therapy or therapeutic, comprising (a) selecting for a (therapeutic) locus of interest nucleic acid component target sites, wherein said target sites have minimal sequence variation across a population, and from said selected target sites subselecting target sites, wherein a nucleic acid component directed against said target sites recognizes a minimal number of off-target sites across said population, or (b) selecting for a (therapeutic) locus of interest nucleic acid component target sites, wherein said target sites have minimal sequence variation across a population, or selecting for a (therapeutic) locus of interest nucleic acid component target sites, wherein a nucleic acid component directed against said target sites recognizes a minimal number of off-target sites across said population, and optionally estimating the number of (sub) selected target sites needed to treat or otherwise modulate or manipulate a population, and optionally validating one or more of the (sub) selected target sites for an individual subject, optionally designing one or more nucleic acid component recognizing one or more of said (sub) selected target sites.

[0687] In one embodiment, the method for developing or designing a nucleic acid component for use in a composition, system, optionally a composition, system, based therapy or therapeutic, can include (a) selecting for a (therapeutic) locus of interest nucleic acid component target sites, wherein said target sites have minimal sequence variation across a population, and from said selected target sites subselecting target sites, wherein a nucleic acid component molecule directed against said target sites recognizes a minimal number of off-target sites across said population, or (b) selecting for a (therapeutic) locus of interest nucleic acid component molecule target sites, wherein said target sites have minimal sequence variation across a population, or selecting for a (therapeutic) locus of interest nucleic acid component molecule target sites, wherein a nucleic acid component molecule directed against said target sites recognizes a minimal number of off-target sites across said population, and optionally estimating the number of (sub) selected target sites needed to treat or otherwise modulate or manipulate a population, optionally validating one or more of the (sub) selected target sites for an individual subject, optionally designing one or more nucleic acid component molecule recognizing one or more of said (sub) selected target sites.

[0688] In one embodiment, thee method for developing or designing a composition, system, optionally a composition, system, based therapy or therapeutic in a population, can include (a) selecting for a (therapeutic) locus of interest reprogrammable spacer target sites, wherein said target sites have minimal sequence variation across a population, and from said selected target sites subselecting target sites, wherein a nucleic acid component directed against said target sites recognizes a minimal number of off-target sites across said population, or (b) selecting for a (therapeutic) locus of interest nucleic acid component reprogrammable spacer target sites, wherein said target sites have minimal sequence variation across a population, or selecting for a (therapeutic) locus of interest nucleic acid component reprogrammable spacer target sites, wherein a nucleic acid component directed against said target sites recognizes a minimal number of off-target sites across said population, and optionally estimating the number of (sub) selected target sites needed to treat or otherwise modulate or manipulate a population, optionally validating one or more of the (sub) selected target sites for an individual subject, optionally designing one or more nucleic acid component recognizing one or more of said (sub) selected target sites.

[0689] In one embodiment the method for developing or designing a nucleic acid component molecule for use in a composition, system, optionally a composition, system, based therapy or therapeutic in a population, can include (a) selecting for a (therapeutic) locus of interest nucleic acid component molecule target sites, wherein said target sites have minimal sequence variation across a population, and from said selected target sites subselecting target sites, wherein a nucleic acid component molecule directed against said target sites recognizes a minimal number of off-target sites across said population, or (b) selecting for a (therapeutic) locus of interest nucleic acid component molecule target sites, wherein said target sites have minimal sequence variation across a population, or selecting for a (therapeutic) locus of interest nucleic acid component molecule target sites, wherein a nucleic acid component molecule directed against said target sites recognizes a minimal number of off-target sites across said population, and optionally estimating the number of (sub) selected target sites needed to treat or otherwise modulate or manipulate a population, optionally validating one or more of the (sub) selected target sites for an individual subject, optionally designing one or more nucleic acid component reprogrammable spacer recognizing one or more of said (sub) selected target sites.

[0690] In one embodiment, the method for developing or designing a composition, system, such as a composition, system, based therapy or therapeutic, optionally in a population; or for developing or designing a nucleic acid component reprogrammable spacer for use in a composition, system, optionally a composition, system, based therapy or therapeutic, optionally in a population, can include selecting a set of target sequences for one or more loci in a target population, wherein the target sequences do not contain variants occurring above a threshold allele frequency in the target population (i.e. platinum target sequences); removing from said selected (platinum) target sequences any target sequences having high frequency off-target candidates (relative to other (platinum) targets in the set) to define a final target sequence set; preparing one or more, such as a set of compositions, systems, based on the final target sequence set, optionally wherein a number of composition prepared is based (at least in part) on the size of a target population.

[0691] In one embodiment, off-target candidates/off-targets, TAMrestrictiveness, target cleavage efficiency, or effector protein specificity is identified or determined using a sequencing-based double-strand break (DSB) detection assay, such as described herein elsewhere. In one embodiment, off-target candidates/off-targets are identified or determined using a sequencing-based double-strand break (DSB) detection assay, such as described herein elsewhere. In one embodiment, off-targets, or off target candidates have at least 1, preferably 1-3, mismatches or (distal) TAMmismatches, such as 1 or more, such as 1, 2, 3, or more (distal) TAMmismatches. In one embodiment, sequencing-based DSB detection assay comprises labeling a site of a DSB with an adapter comprising a primer binding site, labeling a site of a DSB with a barcode or unique molecular identifier, or combination thereof, as described herein elsewhere.

[0692] It will be understood that the reprogrammable spacer sequence of the nucleic acid component is 100% complementary to the target site, i.e., does not comprise any mismatch with the target site. It will be further understood that “recognition” of an (off-) target site by a reprogrammable spacer presupposes composition, system, functionality, i.e. an (off-) target site is only recognized by a reprogrammable spacer RNA if binding of the reprogrammable spacer RNA to the (off-) target site leads to composition, system, activity (such as induction of single or double strand DNA cleavage, transcriptional modulation, etc.).

[0693] In one embodiment, the target sites having minimal sequence variation across a population are characterized by absence of sequence variation in at least 99%, preferably at least 99.9%, more preferably at least 99.99% of the population. In one embodiment, optimizing target location comprises selecting target sequences or loci having an absence of sequence variation in at least 99%, %, preferably at least 99.9%, more preferably at least 99.99% of a population. These targets are referred to herein elsewhere also as “platinum targets”. In one embodiment, said population comprises at least 1000 individuals, such as at least 5000 individuals, such as at least 10000 individuals, such as at least 50000 individuals.

[0694] In one embodiment, the off-target sites are characterized by at least one mismatch between the off-target site and the nucleic acid component. In one embodiment, the off-target sites are characterized by at most five, preferably at most four, more preferably at most three mismatches between the off-target site and the nucleic acid component. In one embodiment, the off-target sites are characterized by at least one mismatch between the off-target site and the nucleic acid component and by at most five, preferably at most four, more preferably at most three mismatches between the off-target site and the nucleic acid component.

[0695] In one embodiment, said minimal number of off-target sites across said population is determined for high-frequency haplotypes in said population. In one embodiment, said minimal number of off-target sites across said population is determined for high-frequency haplotypes of the off-target site locus in said population. In one embodiment, said minimal number of off-target sites across said population is determined for high-frequency haplotypes of the target site locus in said population. In one embodiment, the high-frequency haplotypes are characterized by occurrence in at least 0.1% of the population.

[0696] In one embodiment, the number of (sub) selected target sites needed to treat a population is estimated based on based low frequency sequence variation, such as low frequency sequence variation captured in large scale sequencing datasets. In one embodiment, the number of (sub) selected target sites needed to treat a population of a given size is estimated.

[0697] In one embodiment, the method further comprises obtaining genome sequencing data of a subject to be treated; and treating the subject with a composition, system, selected from the set of compositions, systems, wherein the composition, system, selected is based (at least in part) on the genome sequencing data of the individual. In one embodiment, the ((sub) selected) target is validated by genome sequencing, preferably whole genome sequencing.

[0698] In one embodiment, target sequences or loci as described herein are (further) selected based on optimization of one or more parameters, such as TAMtype (natural or modified), TAMnucleotide content, TAMlength, target sequence length, TAMrestrictiveness, target cleavage efficiency, and target sequence position within a gene, a locus or other genomic region. Methods of optimization are discussed in greater detail elsewhere herein.

[0699] In one embodiment, target sequences or loci as described herein are (further) selected based on optimization of one or more of target loci location, target length, target specificity, and TAMcharacteristics. As used herein, TAMcharacteristics may comprise for instance TAMsequence, TAMlength, and/or TAM GC contents. In one embodiment, optimizing TAMcharacteristics comprises optimizing nucleotide content of aTAM. In one embodiment, optimizing nucleotide content of TAMis selecting a TAM with a motif that maximizes abundance in the one or more target loci, minimizes mutation frequency, or both. Minimizing mutation frequency can for instance be achieved by selecting TAMsequences devoid of or having low or minimal CpG.

[0700] In one embodiment, the effector protein for each composition and system, in the set of compositions, systems, is selected based on optimization of one or more parameters selected from the group consisting of, effector protein size, ability of effector protein to access regions of high chromatin accessibility, degree of uniform enzyme activity across genomic targets, epigenetic tolerance, mismatch/budge tolerance, effector protein specificity, effector protein stability or half-life, effector protein immunogenicity or toxicity. Methods of optimization are discussed in greater detail elsewhere herein.

### Optimization of the Systems

[0701] The methods of the present invention can involve optimization of selected parameters or variables associated with the composition, system, and/or its functionality, as described herein further elsewhere. Optimization of the composition, system, in the methods as described herein may depend on the target(s), such as the therapeutic target or therapeutic targets, the mode or type of composition, system, modulation, such as composition, system, based therapeutic target(s) modulation, modification, or manipulation, as well as the delivery of the composition, system, components. One or more targets may be selected, depending on the genotypic and/or phenotypic outcome. For instance, one or more therapeutic targets may be selected, depending on (genetic) disease etiology or the desired therapeutic outcome. The (therapeutic) target(s) may be a single gene, locus, or other genomic site, or may be multiple genes, loci or other genomic sites. As is known in the art, a single gene, locus, or other genomic site may be targeted more than once, such as by use of multiple nucleic acid components, or nucleic acid component scaffold and multiple reprogrammable spacers.

[0702] The activity of the composition and/or system, such as TnpB polypeptide-based therapy or therapeutics may involve target disruption, such as target mutation, such as leading to gene knockout. The activity of the composition and/or system, such as TnpB polypeptide-based therapy or therapeutics may involve replacement of particular target sites, such as leading to target correction. TnpB polypeptide-based therapy or therapeutics may involve removal of particular target sites, such as leading to target deletion. The activity of the composition and/or system, such as TnpB polypeptide-based therapy or therapeutics may involve modulation of target site functionality, such as target site activity or accessibility, leading for instance to (transcriptional and/or epigenetic) gene or genomic region activation or gene or genomic region silencing. The skilled person will understand that modulation of target site functionality may involve TnpB polypeptide mutation (such as for instance generation of a catalytically inactive TnpB polypeptide) and/or functionalization (such as for instance fusion of the TnpB polypeptide with a heterologous functional domain, such as a transcriptional activator or repressor), as described herein elsewhere.

[0703] Accordingly, in an aspect, the invention relates to a method as described herein, comprising selection of one or more (therapeutic) target, selecting one or more functionality of the composition and/or system, and optimization of selected parameters or variables associated with the composition and/or its functionality. In a related aspect, the invention relates to a method as described herein, comprising (a) selecting one or more (therapeutic) target loci, (b) selecting one or more composition functionalities, (c) optionally selecting one or more modes of delivery, and preparing, developing, or designing a composition herein selected based on steps (a)-(c).

[0704] In one embodiment, the functionality of the composition and/or system comprises genomic mutation. In one embodiment, the functionality of the composition and/or system comprises single genomic mutation. In one embodiment, the functionality of the composition and/or system functionality comprises multiple genomic mutation. In one embodiment, the functionality of the composition and/or system comprises gene knockout. In one embodiment, the functionality of the composition and/or system comprises single gene knockout. In one embodiment, the functionality of the composition and/or system comprises multiple gene knockout. In one embodiment, the functionality of the composition and/or system comprises gene correction. In one embodiment, the functionality of the composition and/or system comprises single gene correction. In one embodiment, the functionality of the composition and/or system comprises multiple gene correction. In one embodiment, the functionality of the composition and/or system comprises genomic region correction. In one embodiment, the functionality of the composition and/or system comprises single genomic region correction. In one embodiment, the functionality of the composition and/or system comprises multiple genomic region correction. In one embodiment, the functionality of the composition and/or system comprises gene deletion. In one embodiment, the functionality of the composition and/or system comprises single gene deletion. In one embodiment, the functionality of the composition and/or system comprises multiple gene deletion. In one embodiment, the functionality of the composition and/or system comprises genomic region deletion. In one embodiment, the functionality of the composition and/or system comprises single genomic region deletion. In one embodiment, the functionality of the composition and/or system comprises multiple genomic region deletion. In one embodiment, the functionality of the composition and/or system comprises modulation of gene or genomic region functionality. In one embodiment, the functionality of the composition and/or system comprises modulation of single gene or genomic region functionality. In one embodiment, the functionality of the composition and/or system comprises modulation of multiple gene or genomic region functionality. In one embodiment, the functionality of the composition and/or system comprises gene or genomic region functionality, such as gene or genomic region activity. In one embodiment, the functionality of the composition and/or system comprises single gene or genomic region functionality, such as gene or genomic region activity. In one embodiment, the functionality of the composition and/or system comprises multiple gene or genomic region functionality, such as gene or genomic region activity. In one embodiment, the functionality of the composition and/or system comprises modulation gene activity or accessibility optionally leading to transcriptional and/or epigenetic gene or genomic region activation or gene or genomic region silencing. In one embodiment, the functionality of the composition and/or system comprises modulation single gene activity or accessibility optionally leading to transcriptional and/or epigenetic gene or genomic region activation or gene or genomic region silencing. In one embodiment, the functionality of the composition and/or system comprises modulation multiple gene activity or accessibility optionally leading to transcriptional and/or epigenetic gene or genomic region activation or gene or genomic region silencing.

[0705] Optimization of selected parameters or variables in the methods as described herein may result in optimized or improved the system, such as TnpB polypeptide-based therapy or therapeutic, specificity, efficacy, and/or safety. In one embodiment, one or more of the following parameters or variables are taken into account, are selected, or are optimized in the methods of the invention as described herein: TnpB polypeptide allosteric interactions, TnpB polypeptide functional domains and functional domain interactions, TnpB polypeptide specificity, nucleic acid component specificity, composition specificity, TAMrestrictiveness, TAMtype (natural or modified), TAMnucleotide content, TAMlength, TnpB polypeptide activity, nucleic acid component activity, TnpB polypeptide/nucleic acid component molecule complex activity, target cleavage efficiency, target site selection, target sequence length, ability of effector protein to access regions of high chromatin accessibility, degree of uniform enzyme activity across genomic targets, epigenetic tolerance, mismatch/budge tolerance, TnpB polypeptide stability, TnpB polypeptide mRNA stability, nucleic acid component molecule stability, TnpB polypeptide complex stability, TnpB polypeptide protein or mRNA immunogenicity or toxicity, nucleic acid component molecule immunogenicity or toxicity, TnpB polypeptide immunogenicity or toxicity, TnpB polypeptide or mRNA dose or titer, nucleic acid component molecule dose or titer, dose or titer, TnpB polypeptide protein size, TnpB polypeptide expression level, nucleic acid component molecule expression level, TnpB polypeptide expression level, TnpB polypeptide spatiotemporal expression, nucleic acid component molecule spatiotemporal expression, TnpB polypeptide/nucleic acid component spatiotemporal expression.

[0706] By means of example, and without limitation, parameter or variable optimization may be achieved as follows. TnpB polypeptide specificity may be optimized by selecting the most specific TnpB polypeptide, e.g., TnpB. This may be achieved for instance by selecting the most specific TnpB polypeptide orthologue or by specific TnpB polypeptide mutations which increase specificity. nucleic acid component specificity may be optimized by selecting the most specific nucleic acid component. This can be achieved for instance by selecting nucleic acid component having low homology, i.e., at least one or preferably more, such as at least 2, or preferably at least 3, mismatches to off-target sites. The specificity may be optimized by increasing TnpB polypeptide specificity and/or nucleic acid component specificity as above.

[0707] Target length or target sequence length may be optimized, for instance, by selecting the appropriate TnpB polypeptide, such as the appropriate TnpB polypeptide recognizing a desired target or target sequence nucleotide length. Alternatively, or in addition, the target (sequence) length may be optimized by providing a target having a length deviating from the target (sequence) length typically associated with the TnpB polypeptide, such as the naturally occurring TnpB polypeptide. The TnpB polypeptide or target (sequence) length may be naturally occurring or may for instance be optimized based on TnpB polypeptide mutants having an altered target (sequence) length recognition, or target (sequence) length recognition repertoire. For instance, increasing or decreasing target (sequence) length may influence target recognition and/or off-target recognition. TnpB polypeptide activity may be optimized by selecting the most active TnpB polypeptide. This may be achieved for instance by selecting the most active TnpB polypeptide ortholog or by specific TnpB polypeptide mutations which increase activity. The ability of the TnpB polypeptide protein to access regions of high chromatin accessibility, may be optimized by selecting the appropriate TnpB polypeptide or mutant thereof, and can consider the size of the TnpB polypeptide, charge, or other dimensional variables etc. The degree of uniform TnpB polypeptide activity may be optimized by selecting the appropriate TnpB polypeptide or mutant thereof, and can consider TnpB polypeptide specificity and/or activity, TAMspecificity, target length, mismatch tolerance, epigenetic tolerance, TnpB polypeptide and/or nucleic acid component stability and/or half-life, TnpB polypeptide and/or nucleic acid component immunogenicity and/or toxicity, etc. nucleic acid component activity may be optimized by selecting the most active nucleic acid component. In one embodiment, this can be achieved by increasing nucleic acid component stability through RNA modification. compositions activity may be optimized by increasing TnpB polypeptide activity and/or nucleic acid component activity as above.

[0708] The target site selection may be optimized by selecting the optimal position of the target site within a gene, locus, or other genomic region. The target site selection may be optimized by optimizing target location comprises selecting a target sequence with a gene, locus, or other genomic region having low variability. This may be achieved for instance by selecting a target site in an early and/or conserved exon or domain (i.e., having low variability, such as polymorphisms, within a population).

[0709] In one embodiment, optimizing target (sequence) length comprises selecting a target sequence within one or more target loci between 5 and 25 nucleotides. In one embodiment, a target sequence is 20 nucleotides.

[0710] In one embodiment, optimizing target specificity comprises selecting targets loci that minimize off-target candidates.

[0711] In one embodiment, the target site may be selected by minimization of off-target effects (e.g., off-targets qualified as having 1-5, 1-4, or preferably 1-3 mismatches compared to target, preferably also considering variability within a population. TnpB polypeptide stability may be optimized by selecting TnpB polypeptide having appropriate half-life, such as preferably a short half-life while still capable of maintaining sufficient activity. In one embodiment, this can be achieved by selecting an appropriate TnpB polypeptide orthologue having a specific half-life or by specific TnpB polypeptide mutations or modifications which affect half-life or stability, such as inclusion (e.g., fusion) of stabilizing or destabilizing domains or sequences. TnpB polypeptide mRNA stability may be optimized by increasing or decreasing TnpB polypeptide mRNA stability. In one embodiment, this can be achieved by increasing or TnpB polypeptide mRNA stability through mRNA modification. nucleic acid component stability may be optimized by increasing or decreasing nucleic acid component stability. In one embodiment, this can be achieved by increasing or decreasing nucleic acid component stability through RNA modification. The stability may be optimized by increasing or decreasing TnpB polypeptide stability and/or nucleic acid component molecule stability as above. TnpB polypeptide protein or mRNA immunogenicity or toxicity may be optimized by decreasing TnpB polypeptide or mRNA immunogenicity or toxicity. In one embodiment, this can be achieved by mRNA or protein modifications. Similarly, in case of DNA based expression systems, DNA immunogenicity or toxicity may be decreased. nucleic acid component immunogenicity or toxicity may be optimized by decreasing nucleic acid component immunogenicity or toxicity. In one embodiment, this can be achieved by nucleic acid component modifications. Similarly, in case of DNA based expression systems, DNA immunogenicity or toxicity may be decreased. The immunogenicity or toxicity may be optimized by decreasing TnpB polypeptide immunogenicity or toxicity and/or nucleic acid component immunogenicity or toxicity as above, or by selecting the least immunogenic or toxic TnpB polypeptide/nucleic acid component combination. Similarly, in case of DNA based expression systems, DNA immunogenicity or toxicity may be decreased. TnpB polypeptide protein or mRNA dose or titer may be optimized by selecting dosage or titer to minimize toxicity and/or maximize specificity and/or efficacy. nucleic acid component dose or titer may be optimized by selecting dosage or titer to minimize toxicity and/or maximize specificity and/or efficacy. The composition dose or titer may be optimized by selecting dosage or titer to minimize toxicity and/or maximize specificity and/or efficacy. The TnpB polypeptide size may be optimized by selecting minimal protein size to increase efficiency of delivery, in particular for virus mediated delivery. TnpB polypeptide, nucleic acid component, or complex thereof expression level may be optimized by limiting (or extending) the duration of expression and/or limiting (or increasing) expression level. This may be achieved for instance by using self-inactivating compositions, systems, such as including a self-targeting (e.g., TnpB polypeptide targeting) nucleic acid component molecule, by using viral vectors having limited expression duration, by using appropriate promoters for low (or high) expression levels, by combining different delivery methods for individual TnpB system components, such as virus mediated delivery of TnpB polypeptide encoding nucleic acid combined with non-virus mediated delivery of nucleic acid component, or virus mediated delivery of nucleic acid component combined with non-virus mediated delivery of TnpB polypeptide or mRNA. TnpB polypeptide, nucleic acid component, or TnpB complex spatiotemporal expression may be optimized by appropriate choice of conditional and/or inducible expression systems, including controllable TnpB polypeptide activity optionally a destabilized TnpB polypeptide and/or a split TnpB polypeptide, and/or cell- or tissue-specific expression systems.

[0712] In an aspect, the invention relates to a method as described herein, comprising selection of one or more (therapeutic) target, selecting the functionality of the composition and/or system, selecting composition mode of delivery, selecting composition delivery vehicle or expression system, and optimization of selected parameters or variables associated with the composition and/or its functionality, optionally wherein the parameters or variables are one or more selected from TnpB polypeptide specificity, nucleic acid component specificity, TnpB complex specificity, TnpB polypeptide activity, nucleic acid component molecule activity, TnpB polypeptide/nucleic acid component complex activity, target cleavage efficiency, target site selection, target sequence length, ability of effector protein to access regions of high chromatin accessibility, degree of uniform enzyme activity across genomic targets, epigenetic tolerance, mismatch/budge tolerance, TnpB polypeptide stability, TnpB polypeptide mRNA stability, nucleic acid component stability, TnpB complex stability, TnpB polypeptide protein or mRNA immunogenicity or toxicity, nucleic acid component immunogenicity or toxicity, TnpB polypeptide/nucleic acid component complex immunogenicity or toxicity, TnpB polypeptide protein or mRNA dose or titer, nucleic acid component dose or titer, TnpB complex dose or titer, TnpB polypeptide protein size, TnpB polypeptide expression level, nucleic acid component expression level, TnpB polypeptide/nucleic acid component molecule complex expression level, TnpB polypeptide spatiotemporal expression, nucleic acid component spatiotemporal expression, TnpB polypeptide/nucleic acid component complex spatiotemporal expression.

[0713] It will be understood that the parameters or variables to be optimized as well as the nature of optimization may depend on the (therapeutic) target, the functionality of the composition and/or system, the system mode of delivery, and/or the composition delivery vehicle or expression system.

[0714] In an aspect, the invention relates to a method as described herein, comprising optimization of nucleic acid component specificity at the population level. Preferably, said optimization of nucleic acid component specificity comprises minimizing nucleic acid component target site sequence variation across a population and/or minimizing nucleic acid component off-target incidence across a population.

[0715] In one embodiment, optimization can result in selection of a TnpB polypeptide that is naturally occurring or is modified. In one embodiment, optimization can result in selection of a TnpB polypeptide that has nuclease, nickase, deaminase, transposase, and/or has one or more effector functionalities deactivated or eliminated. In one embodiment, optimizing a TAMspecificity can include selecting a TnpB polypeptide with a modified TAMspecificity. In one embodiment, optimizing can include selecting a TnpB polypeptide having a minimal size. In one embodiment, optimizing effector protein stability comprises selecting an effector protein having a short half-life while maintaining sufficient activity, such as by selecting an appropriate TnpB polypeptide orthologue having a specific half-life or stability. In one embodiment, optimizing immunogenicity or toxicity comprises minimizing effector protein immunogenicity or toxicity by protein modifications. In one embodiment, optimizing functional specific comprises selecting a protein effector with reduced tolerance of mismatches and/or bulges between the nucleic acid component molecule and one or more target loci.

[0716] In one embodiment, optimizing efficacy comprises optimizing overall efficiency, epigenetic tolerance, or both. In one embodiment, maximizing overall efficiency comprises selecting an effector protein with uniform enzyme activity across target loci with varying chromatin complexity, selecting an effector protein with enzyme activity limited to areas of open chromatin accessibility. In one embodiment, chromatin accessibility is measured using one or more of ATAC-seq, or a DNA-proximity ligation assay. In one embodiment, optimizing epigenetic tolerance comprises optimizing methylation tolerance, epigenetic mark competition, or both. In one embodiment, optimizing methylation tolerance comprises selecting an effector protein that modify methylated DNA. In one embodiment, optimizing epigenetic tolerance comprises selecting an effector protein unable to modify silenced regions of a chromosome, selecting an effector protein able to modify silenced regions of a chromosome, or selecting target loci not enriched for epigenetic markers.

[0717] In one embodiment, selecting an optimized nucleic acid component molecule comprises optimizing stability, immunogenicity, or both, or other associated parameters or variables as described herein elsewhere.

[0718] In one embodiment, optimizing nucleic acid component molecule stability and/or nucleic acid component molecule immunogenicity comprises RNA modification, or other nucleic acid component molecule associated parameters or variables as described herein elsewhere. In one embodiment, the modification comprises removing 1-3 nucleotides form the 3′ end of a target complementarity region of the nucleic acid component molecule. In one embodiment, modification comprises an extended nucleic acid component molecule and/or trans RNA/DNA element that create stable structures in the nucleic acid component molecule that compete with nucleic acid component molecule base pairing at a target of off-target loci or extended complimentary nucleotides between the nucleic acid component molecule and target sequence, or both.

[0719] In one embodiment, the mode of delivery comprises delivering nucleic acid component molecule and/or TnpB polypeptide, delivering nucleic acid component molecule and/or TnpB polypeptide mRNA, or delivery nucleic acid component molecule and/or TnpB polypeptide as a DNA based expression system. In one embodiment, the mode of delivery further comprises selecting a delivery vehicle and/or expression systems from the group consisting of liposomes, lipid particles, nanoparticles, biolistics, or viral-based expression/delivery systems. In one embodiment, expression is spatiotemporal expression is optimized by choice of conditional and/or inducible expression systems, including controllable TnpB polypeptide activity optionally a destabilized TnpB polypeptide and/or a split TnpB polypeptide, and/or cell- or tissue-specific expression system.

[0720] The methods as described herein may further involve selection of the mode of delivery. In one embodiment, nucleic acid component and/or TnpB polypeptide are or are to be delivered. In one embodiment, nucleic acid component and/or TnpB polypeptide mRNA are or are to be delivered. In one embodiment, nucleic acid component and/or TnpB polypeptide provided in a DNA-based expression system are or are to be delivered. In one embodiment, delivery of the individual system components comprises a combination of the above modes of delivery. In one embodiment, delivery comprises delivering nucleic acid component and/or TnpB polypeptide protein, delivering nucleic acid component and/or TnpB polypeptide mRNA, or delivering nucleic acid component and/or TnpB polypeptide as a DNA based expression system.

[0721] The methods as described herein may further involve selection of the composition delivery vehicle and/or expression system. Delivery vehicles and expression systems are described herein elsewhere. By means of example, delivery vehicles of nucleic acids and/or proteins include nanoparticles, liposomes, etc. Delivery vehicles for DNA, such as DNA-based expression systems include for instance biolistics, viral based vector systems (e.g., adenoviral, AAV, lentiviral), etc. the skilled person will understand that selection of the mode of delivery, as well as delivery vehicle or expression system may depend on for instance the cell or tissues to be targeted. In one embodiment, the delivery vehicle and/or expression system for delivering the compositions, systems, or components thereof comprises liposomes, lipid particles, nanoparticles, biolistics, or viral-based expression/delivery systems.

### Considerations for Therapeutic Applications

[0722] A consideration in genome editing therapy is the choice of sequence-specific nuclease, such as a variant of a TnpB polypeptide. Each nuclease variant may possess its own unique set of strengths and weaknesses, many of which must be balanced in the context of treatment to maximize therapeutic benefit. For a specific editing therapy to be efficacious, a sufficiently high level of modification must be achieved in target cell populations to reverse disease symptoms. This therapeutic modification ‘threshold’ is determined by the fitness of edited cells following treatment and the amount of gene product necessary to reverse symptoms. With regard to fitness, editing creates three potential outcomes for treated cells relative to their unedited counterparts: increased, neutral, or decreased fitness. In the case of increased fitness, corrected cells may be able and expand relative to their diseased counterparts to mediate therapy. In this case, where edited cells possess a selective advantage, even low numbers of edited cells can be amplified through expansion, providing a therapeutic benefit to the patient. Where the edited cells possess no change in fitness, an increase the therapeutic modification threshold can be warranted. As such, significantly greater levels of editing may be needed to treat diseases, where editing creates a neutral fitness advantage, relative to diseases where editing creates increased fitness for target cells. If editing imposes a fitness disadvantage, as would be the case for restoring function to a tumor suppressor gene in cancer cells, modified cells would be outcompeted by their diseased counterparts, causing the benefit of treatment to be low relative to editing rates. This may be overcome with supplemental therapies to increase the potency and/or fitness of the edited cells relative to the diseased counterparts.

[0723] In addition to cell fitness, the amount of gene product necessary to treat disease can also influence the minimal level of therapeutic genome editing that can treat or prevent a disease or a symptom thereof. In cases where a small change in the gene product levels can result in significant changes in clinical outcome, the minimal level of therapeutic genome editing is less relative to cases where a larger change in the gene product levels are needed to gain a clinically relevant response. In one embodiment, the minimal level of therapeutic genome editing can range from 0.1 to 1%, 1-5%, 5-10%, 10-15%, 15-20%, 20-25%, 25-30%, 30-35%, 35-40%, 40-45%. 45-50%, or 50-55%. Thus, where a small change in gene product levels can influence clinical outcomes and diseases where there is a fitness advantage for edited cells, are ideal targets for genome editing therapy, as the therapeutic modification threshold is low enough to permit a high chance of success.

[0724] The activity of NHEJ and HDR DSB repair can vary by cell type and cell state. NHEJ is not highly regulated by the cell cycle and is efficient across cell types, allowing for high levels of gene disruption in accessible target cell populations. In contrast, HDR acts primarily during S/G2 phase, and is therefore restricted to cells that are actively dividing, limiting treatments that require precise genome modifications to mitotic cells [Ciccia, A. & Elledge, S. J. Molecular cell 40, 179-204 (2010); Chapman, J. R., et al. Molecular cell 47, 497-510 (2012)].

[0725] The efficiency of correction via HDR may be controlled by the epigenetic state or sequence of the targeted locus, or the specific repair template configuration (single vs. double stranded, long vs. short homology arms) used [Hacein-Bey-Abina, S., et al. The New England journal of medicine 346, 1185-1193 (2002); Gaspar, H. B., et al. Lancet 364, 2181-2187 (2004); Beumer, K. J., et al. G3 (2013)]. The relative activity of NHEJ and HDR machineries in target cells may also affect gene correction efficiency, as these pathways may compete to resolve DSBs [Beumer, K. J., et al. Proceedings of the National Academy of Sciences of the United States of America 105, 19821-19826 (2008)]. HDR also imposes a delivery challenge not seen with NHEJ strategies, as it uses the concurrent delivery of nucleases and repair templates. Thus, these differences can be kept in mind when designing, optimizing, and/or selecting a TnpB polypeptide based therapeutic as described in greater detail elsewhere herein.

[0726] TnpB polypeptide-based polynucleotide modification application can include combinations of proteins, small RNA molecules, and/or repair templates, and can make, In one embodiment, delivery of these multiple parts substantially more challenging than, for example, traditional small molecule therapeutics. Two main strategies for delivery of compositions, systems, and components thereof have been developed: ex vivo and in vivo. In one embodiment of ex vivo treatments, diseased cells are removed from a subject, edited and then transplanted back into the patient. In other embodiments, cells from a healthy allogeneic donor are collected, modified using a composition or component thereof, to impart various functionalities and/or reduce immunogenicity, and administered to an allogeneic recipient in need of treatment. Ex vivo editing has the advantage of allowing the target cell population to be well defined and the specific dosage of therapeutic molecules delivered to cells to be specified. The latter consideration may be particularly important when off-target modifications are a concern, as titrating the amount of nuclease may decrease such mutations (Hsu et al., 2013). Another advantage of ex vivo approaches is the typically high editing rates that can be achieved, due to the development of efficient delivery systems for proteins and nucleic acids into cells in culture for research and gene therapy applications.

[0727] In vivo polynucleotide modification via compositions, systems, and/or components thereof involves direct delivery of the compositions, systems, and/or components thereof to cell types in their native tissues. In vivo polynucleotide modification via compositions, systems, and/or components thereof allows diseases in which the affected cell population is not amenable to ex vivo manipulation to be treated. Furthermore, delivering compositions, systems, and/or components thereof to cells in situ allows for the treatment of multiple tissue and cell types.

[0728] In one embodiment, such as those where viral vector systems are used to generate viral particles to deliver the composition and/or component thereof to a cell, the total cargo size of the composition and/or component thereof should be considered as vector systems can have limits on the size of a polynucleotide that can be expressed therefrom and/or packaged into cargo inside of a viral particle. In one embodiment, the tropism of a vector system, such as a viral vector system, should be considered as it can impact the cell type to which the composition or component thereof can be efficiently and/or effectively delivered.

[0729] When delivering a system or component thereof via a viral-based system, it can be important to consider the amount of viral particles that will be needed to achieve a therapeutic effect so as to account for the potential immune response that can be elicited by the viral particles when delivered to a subject or cell(s). When delivering a system or component thereof via a viral based system, it can be important to consider mechanisms of controlling the distribution and/or dosage of the system in vivo. Generally, to reduce the potential for off-target effects, it is optimal but not necessarily required, that the amount of the system be as close to the minimum or least effective dose. In practice this can be challenging to do.

[0730] In one embodiment, it can be important to consider the immunogenicity of the system or component thereof. In embodiments, where the immunogenicity of the system or component thereof is of concern, the immunogenicity system or component thereof can be reduced. By way of example only, the immunogenicity of the system or component thereof can be reduced using the approach set out in Tangri et al. Accordingly, directed evolution or rational design may be used to reduce the immunogenicity of the TnpB polypeptide in the host species (human or other species).

### Xenotransplantation

[0731] The present invention also contemplates use of the composition described herein, e.g., TnpB polypeptide protein systems, to provide RNA-guided DNA nucleases adapted to be used to provide modified tissues for transplantation. For example, RNA-guided DNA nucleases may be used to knockout, knockdown or disrupt selected genes in an animal, such as a transgenic pig (such as the human heme oxygenase-1 transgenic pig line), for example by disrupting expression of genes that encode epitopes recognized by the human immune system, i.e., xenoantigen genes. Candidate porcine genes for disruption may for example include a (1,3)-galactosyltransferase and cytidine monophosphate-N-acetylneuraminic acid hydroxylase genes (see PCT Patent Publication WO 2014/066505). In addition, genes encoding endogenous retroviruses may be disrupted, for example the genes encoding all porcine endogenous retroviruses (see Yang et al., 2015, Genome-wide inactivation of porcine endogenous retroviruses (PERVs), Science 27 Nov. 2015: Vol. 350 no. 6264 pp. 1101-1104). In addition, RNA-guided DNA nucleases may be used to target a site for integration of additional genes in xenotransplant donor animals, such as a human CD55 gene to improve protection against hyperacute rejection.

[0732] Embodiments of the invention also relate to methods and compositions related to knocking out genes, amplifying genes and repairing particular mutations associated with DNA repeat instability and neurological disorders (Robert D. Wells, Tetsuo Ashizawa, Genetic Instabilities and Neurological Diseases, Second Edition, Academic Press, Oct. 13, 2011-Medical). Specific aspects of tandem repeat sequences have been found to be responsible for more than twenty human diseases (New insights into repeat instability: role of RNA·DNA hybrids. McIvor E I, Polak U, Napierala M. RNA Biol. 2010 September-October; 7(5):551-8). The present effector protein systems may be harnessed to correct these defects of genomic instability.

[0733] Several further aspects of the invention relate to correcting defects associated with a wide range of genetic diseases which are further described on the website of the National Institutes of Health under the topic subsection Genetic Disorders (website at health.nih.gov/topic/GeneticDisorders). The genetic brain diseases may include but are not limited to Adrenoleukodystrophy, Agenesis of the Corpus Callosum, Aicardi Syndrome, Alpers' Disease, Alzheimer's Disease, Barth Syndrome, Batten Disease, CADASIL, Cerebellar Degeneration, Fabry's Disease, Gerstmann-Straussler-Scheinker Disease, Huntington's Disease and other Triplet Repeat Disorders, Leigh's Disease, Lesch-Nyhan Syndrome, Menkes Disease, Mitochondrial Myopathies and NINDS Colpocephaly. These diseases are further described on the website of the National Institutes of Health under the subsection Genetic Brain Disorders.

### Applications in Plants and Fungi

[0734] The compositions, systems, and methods described herein can be used to perform gene or genome interrogation or editing or manipulation in plants and fungi. For example, the applications include investigation and/or selection and/or interrogations and/or comparison and/or manipulations and/or transformation of plant genes or genomes, e.g., to create, identify, develop, optimize, or confer trait(s) or characteristic(s) to plant(s) or to transform a plant or fugus genome. There can accordingly be improved production of plants, new plants with new combinations of traits or characteristics or new plants with enhanced traits. The compositions, systems, and methods can be used with regard to plants in Site-Directed Integration (SDI) or Gene Editing (GE) or any Near Reverse Breeding (NRB) or Reverse Breeding (RB) techniques.

[0735] The compositions, systems, and methods herein may be used to confer desired traits (e.g., enhanced nutritional quality, increased resistance to diseases and resistance to biotic and abiotic stress, and increased production of commercially valuable plant products or heterologous compounds) on essentially any plants and fungi, and their cells and tissues. The compositions, systems, and methods may be used to modify endogenous genes or to modify their expression without the permanent introduction into the genome of any foreign gene.

[0736] In one embodiment, compositions, systems, and methods may be used in genome editing in plants or where RNAi or similar genome editing techniques have been used previously; see, e.g., Nekrasov, “Plant genome editing made easy: targeted mutagenesis in model and crop plants using the CRISPR-Cas system,” Plant Methods 2013, 9:39 (doi:10.1186/1746-4811-9-39); Brooks, “Efficient gene editing in tomato in the first generation using the CRISPR-Cas9 system,” Plant Physiology September 2014 pp 114247577; Shan, “Targeted genome modification of crop plants using a CRISPR-Cas system,” Nature Biotechnology 31, 686-688 (2013); Feng, “Efficient genome editing in plants using a CRISPR/Cas system,” Cell Research (2013) 23:1229-1232. doi:10.1038/cr.2013.114; published online 20 Aug. 2013; Xie, “RNA-guided genome editing in plants using a CRISPR-Cas system,” Mol Plant. 2013 November; 6(6):1975-83. doi: 10.1093/mp/sst119. Epub 2013 Aug. 17; Xu, “Gene targeting using the Agrobacterium tumefaciens-mediated CRISPR-Cas system in rice,” Rice 2014, 7:5 (2014), Zhou et al., “Exploiting SNPs for biallelic CRISPR mutations in the outcrossing woody perennial Populus reveals 4-coumarate: CoA ligase specificity and Redundancy,” New Phytologist (2015) (Forum) 1-4 (available online only at www.newphytologist.com); Caliando et al, “Targeted DNA degradation using a CRISPR device stably carried in the host genome, NATURE COMMUNICATIONS 6:6989, DOI: 10.1038/ncomms7989, www.nature.com/naturecommunications DOI: 10.1038/ncomms7989; U.S. Pat. No. 6,603,061—Agrobacterium-Mediated Plant Transformation Method; U.S. Pat. No. 7,868,149-Plant Genome Sequences and Uses Thereof and US 2009/0100536-Transgenic Plants with Enhanced Agronomic Traits, Morrell et al “Crop genomics: advances and applications,” Nat Rev Genet. 2011 Dec. 29; 13(2):85-96, all the contents and disclosure of each of which are herein incorporated by reference in their entirety. Aspects of utilizing the compositions, systems, and methods may be analogous to the use of the composition in plants, and mention is made of the University of Arizona website “CRISPR-PLANT” (genome.arizona.edu/crispr/) (supported by Penn State and AGI) for direction as to nucleic acid modification in plant systems.

[0737] The compositions, systems, and methods may also be used on protoplasts. A “protoplast” refers to a plant cell that has had its protective cell wall completely or partially removed using, for example, mechanical or enzymatic means resulting in an intact biochemical competent unit of living plant that can reform their cell wall, proliferate, and regenerate grow into a whole plant under proper growing conditions.

[0738] The compositions, systems, and methods may be used for screening genes (e.g., endogenous, mutations) of interest. In some examples, genes of interest include those encoding enzymes involved in the production of a component of added nutritional value or generally genes affecting agronomic traits of interest, across species, phyla, and plant kingdom. By selectively targeting e.g., genes encoding enzymes of metabolic pathways, the genes responsible for certain nutritional aspects of a plant can be identified. Similarly, by selectively targeting genes which may affect a desirable agronomic trait, the relevant genes can be identified. Accordingly, the present invention encompasses screening methods for genes encoding enzymes involved in the production of compounds with a particular nutritional value and/or agronomic traits.

[0739] It is also understood that reference herein to animal cells may also apply, mutatis mutandis, to plant or fungal cells unless otherwise apparent; and the enzymes herein having reduced off-target effects and systems employing such enzymes can be used in plant applications, including those mentioned herein.

[0740] In some cases, nucleic acids introduced to plants and fungi may be codon optimized for expression in the plants and fungi. Methods of codon optimization include those described in Kwon K C, et al., Codon Optimization to Enhance Expression Yields Insights into Chloroplast Translation, Plant Physiol. 2016 September; 172(1):62-77.

[0741] The components (e.g., TnpB polypeptide) in the compositions and systems may further comprise one or more functional domains described herein. In some examples, the functional domains may be an exonuclease. Such exonuclease may increase the efficiency of the TnpB polypeptide′ function, e.g., mutagenesis efficiency. An example of the functional domain is Trex2, as described in Weiss T et al., www.biorxiv.org/content/10.1101/2020.04.11.037572v1, doi: doi.org/10.1101/2020.04.11.037572.

### Examples of Plants

[0742] The compositions, systems, and methods herein can be used to confer desired traits on essentially any plant. A wide variety of plants and plant cell systems may be engineered for the desired physiological and agronomic characteristics. In general, the term “plant” relates to any various photosynthetic, eukaryotic, unicellular, or multicellular organism of the kingdom Plantae characteristically growing by cell division, containing chloroplasts, and having cell walls comprised of cellulose. The term plant encompasses monocotyledonous and dicotyledonous plants.

[0743] The compositions, systems, and methods may be used over a broad range of plants, such as for example with dicotyledonous plants belonging to the orders Magniolales, Illiciales, Laurales, Piperales, Aristochiales, Nymphaeales, Ranunculales, Papeverales, Sarraceniaceae, Trochodendrales, Hamamelidales, Eucomiales, Leitneriales, Myricales, Fagales, Casuarinales, Caryophyllales, Batales, Polygonales, Plumbaginales, Dilleniales, Theales, Malvales, Urticales, Lecythidales, Violales, Salicales, Capparales, Ericales, Diapensales, Ebenales, Primulales, Rosales, Fabales, Podostemales, Haloragales, Myrtales, Cornales, Proteales, San tales, Rafflesiales, Celastrales, Euphorbiales, Rhamnales, Sapindales, Juglandales, Geraniales, Polygalales, Umbellales, Gentianales, Polemoniales, Lamiales, Plantaginales, Scrophulariales, Campamilales, Rubiales, Dipsacales, and Asterales; monocotyledonous plants such as those belonging to the orders Alismatales, Hydrocharitales, Najadales, Triuridales, Commelinales, Eriocaulales, Restionales, Poales. Juncales, Cyperales, Typhales, Bromeliales, Zingiberales. Arecales, Cyclanthales, Pandanales, Arales, Lilliales, and Orchid ales, or with plants belonging to Gymnospermae, e.g., those belonging to the orders Pinales, Ginkgoales, Cycadales, Araucariales, Cupressales and Gnetales.

[0744] The compositions, systems, and methods herein can be used over a broad range of plant species, included in the non-limitative list of dicot, monocot or gymnosperm genera hereunder: Atropa, Alseodaphne, Anacardium, Arachis, Beilschmiedia, Brassica, Carthamus, Cocculus, Croton, Cucumis, Citrus, Citrullus, Capsicum, Catharanthus, Cocos, Coffea, Cucurbita, Daucus, Duguetia, Eschscholzia, Ficus, Fragaria, Glaucium, Glycine, Gossypium, Helianthus, Hevea, Hyoscyamus, Lactuca, Landolphia, Linum, Litsea, Lycopersicon, Lupinus, Manihot, Majorana, Malus, Medicago, Nicotiana, Olea, Parthenium, Papaver, Persea, Phaseolus, Pistacia, Pisum, Pyrus, Prunus, Raphanus, Ricinus, Senecio, Sinomenium, Stephania, Sinapis, Solanum, Theobroma, Trifolium, Trigonella, Vicia, Vinca, Vilis, and Vigna; and the genera Allium, Andropogon, Aragrostis, Asparagus, Avena, Cynodon, Elaeis, Festuca, Festulolium, Heterocallis, Hordeum, Lemna, Lolium, Musa, Oryza, Panicum, Pannesetum, Phleum, Poa, Secale, Sorghum, Triticum, Zea, Abies, Cunninghamia, Ephedra, Picea, Pinus, and Pseudotsuga.

[0745] In one embodiment, target plants and plant cells for engineering include those monocotyledonous and dicotyledonous plants, such as crops including grain crops (e.g., wheat, maize, rice, millet, barley), fruit crops (e.g., tomato, apple, pear, strawberry, orange), forage crops (e.g., alfalfa), root vegetable crops (e.g., carrot, potato, sugar beets, yam), leafy vegetable crops (e.g., lettuce, spinach); flowering plants (e.g., petunia, rose, chrysanthemum), conifers and pine trees (e.g., pine fir, spruce); plants used in phytoremediation (e.g., heavy metal accumulating plants); oil crops (e.g., sunflower, rape seed) and plants used for experimental purposes (e.g., Arabidopsis). Specifically, the plants are intended to comprise without limitation angiosperm and gymnosperm plants such as acacia, alfalfa, amaranth, apple, apricot, artichoke, ash tree, asparagus, avocado, banana, barley, beans, beet, birch, beech, blackberry, blueberry, broccoli, Brussel's sprouts, cabbage, canola, cantaloupe, carrot, cassava, cauliflower, cedar, a cereal, celery, chestnut, cherry, Chinese cabbage, citrus, clementine, clover, coffee, corn, cotton, cowpea, cucumber, cypress, eggplant, elm, endive, eucalyptus, fennel, figs, fir, geranium, grape, grapefruit, groundnuts, ground cherry, gum hemlock, hickory, kale, kiwifruit, kohlrabi, larch, lettuce, leek, lemon, lime, locust, pine, maidenhair, maize, mango, maple, melon, millet, mushroom, mustard, nuts, oak, oats, oil palm, okra, onion, orange, an ornamental plant or flower or tree, papaya, palm, parsley, parsnip, pea, peach, peanut, pear, peat, pepper, persimmon, pigeon pea, pine, pineapple, plantain, plum, pomegranate, potato, pumpkin, radicchio, radish, rapeseed, raspberry, rice, rye, sorghum, safflower, sallow, soybean, spinach, spruce, squash, strawberry, sugar beet, sugarcane, sunflower, sweet potato, sweet corn, tangerine, tea, tobacco, tomato, trees, triticale, turf grasses, turnips, vine, walnut, watercress, watermelon, wheat, yams, yew, and zucchini.

[0746] The term plant also encompasses Algae, which are mainly photoautotrophs unified primarily by their lack of roots, leaves and other organs that characterize higher plants. The compositions, systems, and methods can be used over a broad range of “algae” or “algae cells.” Examples of algae include eukaryotic phyla, including the Rhodophyta (red algae), Chlorophyta (green algae), Phaeophyta (brown algae), Bacillariophyta (diatoms), Eustigmatophyta and dinoflagellates as well as the prokaryotic phylum Cyanobacteria (blue-green algae). Examples of algae species include those of Amphora, Anabaena, Anikstrodesmis, Botryococcus, Chaetoceros, Chlamydomonas, Chlorella, Chlorococcum, Cyclotella, Cylindrotheca, Dunaliella, Emiliana, Euglena, Hematococcus, Isochrysis, Monochrysis, Monoraphidium, Nannochloris, Nannnochloropsis, Navicula, Nephrochloris, Nephroselmis, Nitzschia, Nodularia, Nostoc, Oochromonas, Oocystis, Oscillartoria, Pavlova, Phaeodactylum, Playtmonas, Pleurochrysis, Porhyra, Pseudoanabaena, Pyramimonas, Stichococcus, Synechococcus, Synechocystis, Tetraselmis, Thalassiosira, and Trichodesmium.

### Plant Promoters

[0747] In order to ensure appropriate expression in a plant cell, the components of the components and systems herein may be placed under control of a plant promoter. A plant promoter is a promoter operable in plant cells. A plant promoter is capable of initiating transcription in plant cells, whether or not its origin is a plant cell. The use of different types of promoters is envisaged.

[0748] In some examples, the plant promoter is a constitutive plant promoter, which is a promoter that is able to express the open reading frame (ORF) that it controls in all or nearly all of the plant tissues during all or nearly all developmental stages of the plant (referred to as “constitutive expression”). One example of a constitutive promoter is the cauliflower mosaic virus 35S promoter. In some examples, the plant promoter is a regulated promoter, which directs gene expression not constitutively, but in a temporally- and/or spatially-regulated manner, and includes tissue-specific, tissue-preferred and inducible promoters. Different promoters may direct the expression of a gene in different tissues or cell types, or at different stages of development, or in response to different environmental conditions. In some examples, the plant promoter is a tissue-preferred promoters, which can be utilized to target enhanced expression in certain cell types within a particular plant tissue, for instance vascular cells in leaves or roots or in specific cells of the seed.

[0749] Exemplary plant promoters include those obtained from plants, plant viruses, and bacteria such as Agrobacterium or Rhizobium which comprise genes expressed in plant cells. Additional examples of promoters include those described in Kawamata et al., (1997) Plant Cell Physiol 38:792-803; Yamamoto et al., (1997) Plant J 12:255-65; Hire et al., (1992) Plant Mol Biol 20:207-18; Kuster et al., (1995) Plant Mol Biol 29:759-72; and Capana et al., (1994) Plant Mol Biol 25:681-91.

[0750] In some examples, a plant promoter may be an inducible promoter, which is inducible and allows for spatiotemporal control of gene editing or gene expression may use a form of energy. The form of energy may include sound energy, electromagnetic radiation, chemical energy and/or thermal energy. Examples of inducible systems include tetracycline inducible promoters (Tet-On or Tet-Off), small molecule two-hybrid transcription activations systems (FKBP, ABA, etc.), or light inducible systems (Phytochrome, LOV domains, or cryptochrome), such as a Light Inducible Transcriptional Effector (LITE) that direct changes in transcriptional activity in a sequence-specific manner. In a particular example, of the components of a light inducible system include a TnpB polypeptide, a light-responsive cytochrome heterodimer (e.g., from Arabidopsis thaliana), and a transcriptional activation/repression domain.

[0751] In some examples, the promoter may be a chemical-regulated promotor (where the application of an exogenous chemical induces gene expression) or a chemical-repressible promoter (where application of the chemical represses gene expression). Examples of chemical-inducible promoters include maize In2-2 promoter (activated by benzene sulfonamide herbicide safeners), the maize GST promoter (activated by hydrophobic electrophilic compounds used as pre-emergent herbicides), the tobacco PR-1 a promoter (activated by salicylic acid), promoters regulated by antibiotics (such as tetracycline-inducible and tetracycline-repressible promoters).

### Stable Integration in the Genome of Plants

[0752] In one embodiment, polynucleotides encoding the components of the compositions and systems may be introduced for stable integration into the genome of a plant cell. In some cases, vectors or expression systems may be used for such integration. The design of the vector or the expression system can be adjusted depending on for when, where and under what conditions the nucleic acid component molecule and/or the TnpB polypeptide gene are expressed. In some cases, the polynucleotides may be integrated into an organelle of a plant, such as a plastid, mitochondrion or a chloroplast. The elements of the expression system may be on one or more expression constructs which are either circular such as a plasmid or transformation vector, or non-circular such as linear double stranded DNA.

[0753] In one embodiment, the method of integration generally comprises the steps of selecting a suitable host cell or host tissue, introducing the construct(s) into the host cell or host tissue, and regenerating plant cells or plants therefrom. In some examples, the expression system for stable integration into the genome of a plant cell may contain one or more of the following elements: a promoter element that can be used to express the RNA and/or TnpB polypeptide in a plant cell; a 5′ untranslated region to enhance expression; an intron element to further enhance expression in certain cells, such as monocot cells; a multiple-cloning site to provide convenient restriction sites for inserting the nucleic acid component molecule and/or the TnpB polypeptide gene sequences and other desired elements; and a 3′ untranslated region to provide for efficient termination of the expressed transcript.

### Transient Expression in Plants

[0754] In one embodiment, the components of the compositions and systems may be transiently expressed in the plant cell. In some examples, the compositions and systems may modify a target nucleic acid only when both the nucleic acid component molecule and the TnpB polypeptide are present in a cell, such that genomic modification can further be controlled. As the expression of the TnpB polypeptide is transient, plants regenerated from such plant cells typically contain no foreign DNA. In certain examples, the TnpB polypeptide is stably expressed and the nucleic acid component molecule sequence is transiently expressed.

[0755] DNA and/or RNA (e.g., mRNA) may be introduced to plant cells for transient expression. In such cases, the introduced nucleic acid may be provided in sufficient quantity to modify the cell but do not persist after a contemplated period of time has passed or after one or more cell divisions.

[0756] The transient expression may be achieved using suitable vectors. Exemplary vectors that may be used for transient expression include a PEAQ vector (may be tailored for Agrobacterium-mediated transient expression) and Cabbage Leaf Curl virus (CaLCuV), and vectors described in Sainsbury F. et al., Plant Biotechnol J. 2009 September; 7(7):682-93; and Yin K et al., Scientific Reports volume 5, Article number: 14926 (2015).

[0757] Combinations of the different methods described above are also envisaged.

Translocation to and/or Expression in Specific Plant Organelles

[0758] The compositions and systems herein may comprise elements for translocation to and/or expression in a specific plant organelle.

### Chloroplast Targeting

[0759] In one embodiment, it is envisaged that the compositions and systems are used to specifically modify chloroplast genes or to ensure expression in the chloroplast. The compositions and systems (e.g., TnpB polypeptide, nucleic acid components, or their encoding polynucleotides) may be transformed, compartmentalized, and/or targeted to the chloroplast. In an example, the introduction of genetic modifications in the plastid genome can reduce biosafety issues such as gene flow through pollen.

[0760] Examples of methods of chloroplast transformation include Particle bombardment, PEG treatment, and microinjection, and the translocation of transformation cassettes from the nuclear genome to the plastid. In some examples, targeting of chloroplasts may be achieved by incorporating in chloroplast localization sequence, and/or the expression construct a sequence encoding a chloroplast transit peptide (CTP) or plastid transit peptide, operably linked to the 5′ region of the sequence encoding the components of the compositions and systems. Additional examples of transforming, targeting and localization of chloroplasts include those described in WO2010061186, Protein Transport into Chloroplasts, 2010, Annual Review of Plant Biology, Vol. 61:157-180, and US20040142476, which are incorporated by reference herein in their entireties.

### Exemplary Applications in Plants

[0761] The compositions, systems, and methods may be used to generate genetic variation(s) in a plant (e.g., crop) of interest. One or more, e.g., a library of, nucleic acid components targeting one or more locations in a genome may be provided and introduced into plant cells together with the TnpB polypeptide. For example, a collection of genome-scale point mutations and gene knock-outs can be generated. In some examples, the compositions, systems, and methods may be used to generate a plant part or plant from the cells so obtained and screening the cells for a trait of interest. The target genes may include both coding and non-coding regions. In some cases, the trait is stress tolerance and the method is a method for the generation of stress-tolerant crop varieties.

[0762] In one embodiment, the compositions, systems, and methods are used to modify endogenous genes or to modify their expression. The expression of the components may induce targeted modification of the genome, either by direct activity of the TnpB polypeptide and optionally introduction of recombination template DNA, or by modification of genes targeted. The different strategies described herein above allow TnpB polypeptide-mediated targeted genome editing without requiring the introduction of the components into the plant genome.

[0763] In some cases, the modification may be performed without the permanent introduction into the genome of the plant of any foreign gene, including those encoding components of the composition herein, so as to avoid the presence of foreign DNA in the genome of the plant. This can be of interest as the regulatory requirements for non-transgenic plants are less rigorous. Components which are transiently introduced into the plant cell are typically removed upon crossing.

[0764] For example, the modification may be performed by transient expression of the components of the compositions and systems. The transient expression may be performed by delivering the components of the compositions and systems with viral vectors, delivery into protoplasts, with the aid of particulate molecules such as nanoparticles or CPPs.

Generation of Plants with Desired Traits

[0765] The compositions, systems, and methods herein may be used to introduce desired traits to plants. The approaches include introduction of one or more foreign genes to confer a trait of interest, editing or modulating endogenous genes to confer a trait of interest.

### Agronomic Traits

[0766] In one embodiment, crop plants can be improved by influencing specific plant traits. Examples of the traits include improved agronomic traits such as herbicide resistance, disease resistance, abiotic stress tolerance, high yield, and superior quality, pesticide-resistance, disease resistance, insect and nematode resistance, resistance against parasitic weeds, drought tolerance, nutritional value, stress tolerance, self-pollination voidance, forage digestibility biomass, and grain yield.

[0767] In one embodiment, genes that confer resistance to pests or diseases may be introduced to plants. In cases, there are endogenous genes that confer such resistance in plants, their expression and function may be enhanced (e.g., by introducing extra copies, modifications that enhance expression and/or activity).

[0768] Examples of genes that confer resistance include plant disease resistance genes (e.g., Cf-9, Pto, RSP2, SIDMR6-1), genes conferring resistance to a pest (e.g., those described in WO96/30517), Bacillus thuringiensis proteins, lectins, Vitamin-binding proteins (e.g., avidin), enzyme inhibitors (e.g., protease or proteinase inhibitors or amylase inhibitors), insect-specific hormones or pheromones (e.g., ecdysteroid or a juvenile hormone, variant thereof, a mimetic based thereon, or an antagonist or agonist thereof) or genes involved in the production and regulation of such hormone and pheromones, insect-specific peptides or neuropeptide, Insect-specific venom (e.g., produced by a snake, a wasp, etc., or analog thereof), Enzymes responsible for a hyperaccumulation of a monoterpene, a sesquiterpene, a steroid, hydroxamic acid, a phenylpropanoid derivative or another nonprotein molecule with insecticidal activity, Enzymes involved in the modification of biologically active molecule (e.g., a glycolytic enzyme, a proteolytic enzyme, a lipolytic enzyme, a nuclease, a cyclase, a transaminase, an esterase, a hydrolase, a phosphatase, a kinase, a phosphorylase, a polymerase, an elastase, a chitinase and a glucanase, whether natural or synthetic), molecules that stimulates signal transduction, Viral-invasive proteins or a complex toxin derived therefrom, Developmental-arrestive proteins produced in nature by a pathogen or a parasite, a developmental-arrestive protein produced in nature by a plant, or any combination thereof.

[0769] The compositions, systems, and methods may be used to identify, screen, introduce or remove mutations or sequences lead to genetic variability that give rise to susceptibility to certain pathogens, e.g., host specific pathogens. Such approach may generate plants that are non-host resistance, e.g., the host and pathogen are incompatible or there can be partial resistance against all races of a pathogen, typically controlled by many genes and/or also complete resistance to some races of a pathogen but not to other races.

[0770] In one embodiment, the compositions, systems, and methods may be used to modify genes involved in plant diseases. Such genes may be removed, inactivated, or otherwise regulated or modified. Examples of plant diseases include those described in [0045]-[0080] of US20140213619A1, which is incorporated by reference herein in its entirety.

[0771] In one embodiment, genes that confer resistance to herbicides may be introduced to plants. Examples of genes that confer resistance to herbicides include genes conferring resistance to herbicides that inhibit the growing point or meristem, such as an imidazolinone or a sulfonylurea, genes conferring glyphosate tolerance (e.g., resistance conferred by, e.g., mutant 5-enolpyruvylshikimate-3-phosphate synthase genes, aroA genes and glyphosate acetyl transferase (GAT) genes, respectively), or resistance to other phosphono compounds such as by glufosinate (phosphinothricin acetyl transferase (PAT) genes from Streptomyces species, including Streptomyces hygroscopicus and Streptomyces viridichromogenes), and to pyridinoxy or phenoxy proprionic acids and cyclohexones by ACCase inhibitor-encoding genes), genes conferring resistance to herbicides that inhibit photosynthesis (such as a triazine (psbA and gs+ genes) or a benzonitrile (nitrilase gene), and glutathione S-transferase), genes encoding enzymes detoxifying the herbicide or a mutant glutamine synthase enzyme that is resistant to inhibition, genes encoding a detoxifying enzyme is an enzyme encoding a phosphinothricin acetyltransferase (such as the bar or pat protein from Streptomyces species), genes encoding hydroxyphenylpyruvatedioxygenases (HPPD) inhibitors, e.g., naturally occurring HPPD resistant enzymes, and genes encoding a mutated or chimeric HPPD enzyme.

[0772] In one embodiment, genes involved in Abiotic stress tolerance may be introduced to plants. Examples of genes include those capable of reducing the expression and/or the activity of poly(ADP-ribose) polymerase (PARP) gene, transgenes capable of reducing the expression and/or the activity of the PARG encoding genes, genes coding for a plant-functional enzyme of the nicotineamide adenine dinucleotide salvage synthesis pathway including nicotinamidase, nicotinate phosphoribosyltransferase, nicotinic acid mononucleotide adenyl transferase, nicotinamide adenine dinucleotide synthetase or nicotine amide phosphorybosyltransferase, enzymes involved in carbohydrate biosynthesis, enzymes involved in the production of polyfructose (e.g., the inulin and levan-type), the production of alpha-1,6 branched alpha-1,4-glucans, the production of alternan, the production of hyaluronan.

[0773] In one embodiment, genes that improve drought resistance may be introduced to plants. Examples of genes Ubiquitin Protein Ligase protein (UPL) protein (UPL3), DR02, DR03, ABC transporter, and DREBIA.

### Nutritionally Improved Plants

[0774] In one embodiment, the compositions, systems, and methods may be used to produce nutritionally improved plants. In some examples, such plants may provide functional foods, e.g., a modified food or food ingredient that may provide a health benefit beyond the traditional nutrients it contains. In certain examples, such plants may provide nutraceuticals foods, e.g., substances that may be considered a food or part of a food and provides health benefits, including the prevention and treatment of disease. The nutraceutical foods may be useful in the prevention and/or treatment of diseases in animals and humans, e.g., cancers, diabetes, cardiovascular disease, and hypertension.

[0775] An improved plant may naturally produce one or more desired compounds and the modification may enhance the level or activity or quality of the compounds. In some cases, the improved plant may not naturally produce the compound(s), while the modification enables the plant to produce such compound(s). In some cases, the compositions, systems, and methods used to modify the endogenous synthesis of these compounds indirectly, e.g., by modifying one or more transcription factors that controls the metabolism of this compound.

[0776] Examples of nutritionally improved plants include plants comprising modified protein quality, content and/or amino acid composition, essential amino acid contents, oils and fatty acids, carbohydrates, vitamins and carotenoids, functional secondary metabolites, and minerals. In some examples, the improved plants may comprise or produce compounds with health benefits. Examples of nutritionally improved plants include those described in Newell-McGloughlin, Plant Physiology, July 2008, Vol. 147, pp. 939-953.

[0777] Examples of compounds that can be produced include carotenoids (e.g., α-Carotene or β-Carotene), lutein, lycopene, Zeaxanthin, Dietary fiber (e.g., insoluble fibers, β-Glucan, soluble fibers, fatty acids (e.g., ω-3 fatty acids, Conjugated linoleic acid, GLA,), Flavonoids (e.g., Hydroxycinnamates, flavonols, catechins and tannins), Glucosinolates, indoles, isothiocyanates (e.g., Sulforaphane), Phenolics (e.g., stilbenes, caffeic acid and ferulic acid, epicatechin), Plant stanols/sterols, Fructans, inulins, fructo-oligosaccharides, Saponins, Soybean proteins, Phytoestrogens (e.g., isoflavones, lignans), Sulfides and thiols such as diallyl sulphide, Allyl methyl trisulfide, dithiolthiones, Tannins, such as proanthocyanidins, or any combination thereof.

[0778] The compositions, systems, and methods may also be used to modify protein/starch functionality, shelf life, taste/aesthetics, fiber quality, and allergen, antinutrient, and toxin reduction traits.

[0779] Examples of genes and nucleic acids that can be modified to introduce the traits include stearyl-ACP desaturase, DNA associated with the single allele which may be responsible for maize mutants characterized by low levels of phytic acid, Tf RAP2.2 and its interacting partner SINAT2, Tf Dof1, and DOF Tf AtDof1.1 (OBP2).

### Modification of Polyploid Plants

[0780] The compositions, systems, and methods may be used to modify polyploid plants. Polyploid plants carry duplicate copies of their genomes (e.g., as many as six, such as in wheat). In some cases, the compositions, systems, and methods may be multiplexed to affect all copies of a gene, or to target dozens of genes at once. For instance, the compositions, systems, and methods may be used to simultaneously ensure a loss of function mutation in different genes responsible for suppressing defenses against a disease. The modification may be simultaneous suppression the expression of the TaMLO-A1, TaMLO-B1 and TaMLO-D1 nucleic acid sequence in a wheat plant cell and regenerating a wheat plant therefrom, in order to ensure that the wheat plant is resistant to powdery mildew (e.g., as described in WO2015109752).

### Regulation of Fruit-Ripening

[0781] The compositions, systems, and methods may be used to regulate ripening of fruits. Ripening is a normal phase in the maturation process of fruits and vegetables. Only a few days after it starts it may render a fruit or vegetable inedible, which can bring significant losses to both farmers and consumers.

[0782] In one embodiment, the compositions, systems, and methods are used to reduce ethylene production. In some examples, the compositions, systems, and methods may be used to suppress the expression and/or activity of ACC synthase, insert an ACC deaminase gene or a functional fragment thereof, insert a SAM hydrolase gene or functional fragment thereof, suppress ACC oxidase gene expression

[0783] Alternatively or additionally, the compositions, systems, and methods may be used to modify ethylene receptors (e.g., suppressing ETR1) and/or Polygalacturonase (PG). Suppression of a gene may be achieved by introducing a mutation, an antisense sequence, and/or a truncated copy of the gene to the genome.

### Increasing Storage Life of Plants

[0784] In one embodiment, the compositions, systems, and methods are used to modify genes involved in the production of compounds which affect storage life of the plant or plant part. The modification may be in a gene that prevents the accumulation of reducing sugars in potato tubers. Upon high-temperature processing, these reducing sugars react with free amino acids, resulting in brown, bitter-tasting products, and elevated levels of acrylamide, which is a potential carcinogen. In particular embodiments, the methods provided herein are used to reduce or inhibit expression of the vacuolar invertase gene (VInv), which encodes a protein that breaks down sucrose to glucose and fructose.

### Reducing Allergens in Plants

[0785] In one embodiment, the compositions, systems, and methods are used to generate plants with a reduced level of allergens, making them safer for consumers. To this end, the compositions, systems, and methods may be used to identify and modify (e.g., suppress) one or more genes responsible for the production of plant allergens. Examples of such genes include Lol p5, as well as those in peanuts, soybeans, lentils, peas, lupin, green beans, mung beans, such as those described in Nicolaou et al., Current Opinion in Allergy and Clinical Immunology 2011; 11(3):222), which is incorporated by reference herein in its entirety.

### Generation of Male Sterile Plants

[0786] The compositions, systems, and methods may be used to generate male sterile plants. Hybrid plants typically have advantageous agronomic traits compared to inbred plants. However, for self-pollinating plants, the generation of hybrids can be challenging. In different plant types (e.g., maize and rice), genes have been identified which are important for plant fertility, more particularly male fertility. Plants that are as such genetically altered can be used in hybrid breeding programs.

[0787] The compositions, systems, and methods may be used to modify genes involved male fertility, e.g., inactivating (such as by introducing mutations to) genes required for male fertility. Examples of the genes involved in male fertility include cytochrome P450-like gene (MS26) or the meganuclease gene (MS45), and those described in Wan X et al., Mol Plant. 2019 Mar. 4; 12(3):321-342; and Kim Y J, et al., Trends Plant Sci. 2018 January; 23(1):53-65.

### Increasing the Fertility Stage in Plants

[0788] In one embodiment, the compositions, systems, and methods may be used to prolong the fertility stage of a plant such as of a rice. For instance, a rice fertility stage gene such as Ehd3 can be targeted in order to generate a mutation in the gene and plantlets can be selected for a prolonged regeneration plant fertility stage.

### Production of Early Yield of Products

[0789] In one embodiment, the compositions, systems, and methods may be used to produce early yield of the product. For example, flowering process may be modulated, e.g., by mutating flowering repressor gene such as SP5G. Examples of such approaches include those described in Soyk S, et al., Nat Genet. 2017 January; 49(1):162-168.

### Oil and Biofuel Production

[0790] The compositions, systems, and methods may be used to generate plants for oil and biofuel production. Biofuels include fuels made from plant and plant-derived resources. Biofuels may be extracted from organic matter whose energy has been obtained through a process of carbon fixation or are made through the use or conversion of biomass. This biomass can be used directly for biofuels or can be converted to convenient energy containing substances by thermal conversion, chemical conversion, and biochemical conversion. This biomass conversion can result in fuel in solid, liquid, or gas form. Biofuels include bioethanol and biodiesel. Bioethanol can be produced by the sugar fermentation process of cellulose (starch), which may be derived from maize and sugar cane. Biodiesel can be produced from oil crops such as rapeseed, palm, and soybean. Biofuels can be used for transportation.

### Generation of Plants for Production of Vegetable Oils and Biofuels

[0791] The compositions, systems, and methods may be used to generate algae (e.g., diatom) and other plants (e.g., grapes) that express or overexpress high levels of oil or biofuels.

[0792] In some cases, the compositions, systems, and methods may be used to modify genes involved in the modification of the quantity of lipids and/or the quality of the lipids. Examples of such genes include those involved in the pathways of fatty acid synthesis, e.g., acetyl-CoA carboxylase, fatty acid synthase, 3-ketoacyl_acyl-carrier protein synthase III, glycerol-3-phospate deshydrogenase (G3PDH), Enoyl-acyl carrier protein reductase (Enoyl-ACP-reductase), glycerol-3-phosphate acyltransferase, lysophosphatidic acyl transferase or diacylglycerol acyltransferase, phospholipid: diacylglycerol acyltransferase, phoshatidate phosphatase, fatty acid thioesterase such as palmitoyi protein thioesterase, or malic enzyme activities.

[0793] In further embodiments, it is envisaged to generate diatoms that have increased lipid accumulation. This can be achieved by targeting genes that decrease lipid catabolization. Examples of genes include those involved in the activation of triacylglycerol and free fatty acids, B-oxidation of fatty acids, such as genes of acyl-CoA synthetase, 3-ketoacyl-CoA thiolase, acyl-CoA oxidase activity and phosphoglucomutase.

[0794] In some examples, algae may be modified for production of oil and biofuels, including fatty acids (e.g., fatty esters such as acid methyl esters (FAME) and fatty acid ethyl esters (FAEE)). Examples of methods of modifying microalgae include those described in Stovicek et al. Metab. Eng. Comm., 2015; 2:1; U.S. Pat. No. 8,945,839; and International Patent Publication No. WO 2015/086795.

[0795] In some examples, one or more genes may be introduced (e.g., overexpressed) to the plants (e.g., algae) to produce oils and biofuels (e.g., fatty acids) from a carbon source (e.g., alcohol). Examples of the genes include genes encoding acyl-CoA synthases, ester synthases, thioesterases (e.g., tesA, ′tesA, tesB, fatB, fatB2, fatB3, fatA1, or fatA), acyl-CoA synthases (e.g., fadD, JadK, BH3103, pfl-4354, EAV15023, fadD1, fadD2, RPC_4074,fadDD35, fadDD22, faa39), ester synthases (e.g., synthase/acyl-CoA: diacylglycerl acyltransferase from Simmondsia chinensis, Acinetobacter sp. ADP, Alcanivorax borkumensis, Pseudomonas aeruginosa, Fundibacter jadensis, Arabidopsis thaliana, or Alkaligenes eutrophus, or variants thereof).

[0796] Additionally or alternatively, one or more genes in the plants (e.g., algae) may be inactivated (e.g., expression of the genes is decreased). For examples, one or more mutations may be introduced to the genes. Examples of such genes include genes encoding acyl-CoA dehydrogenases (e.g., fade), outer membrane protein receptors, and transcriptional regulator (e.g., repressor) of fatty acid biosynthesis (e.g., fabR), pyruvate formate lyases (e.g., pflB), lactate dehydrogenases (e.g., IdhA).

### Organic Acid Production

[0797] In one embodiment, plants may be modified to produce organic acids such as lactic acid. The plants may produce organic acids using sugars, pentose or hexose sugars. To this end, one or more genes may be introduced (e.g., and overexpressed) in the plants. An example of such genes include LDH gene.

[0798] In some examples, one or more genes may be inactivated (e.g., expression of the genes is decreased). For examples, one or more mutations may be introduced to the genes. The genes may include those encoding proteins involved an endogenous metabolic pathway which produces a metabolite other than the organic acid of interest and/or wherein the endogenous metabolic pathway consumes the organic acid.

[0799] Examples of genes that can be modified or introduced include those encoding pyruvate decarboxylases (pdc), fumarate reductases, alcohol dehydrogenases (adh), acetaldehyde dehydrogenases, phosphoenolpyruvate carboxylases (ppc), D-lactate dehydrogenases (d-ldh), L-lactate dehydrogenases (1-ldh), lactate 2-monooxygenases, lactate dehydrogenase, cytochrome-dependent lactate dehydrogenases (e.g., cytochrome B2-dependent L-lactate dehydrogenases).

### Enhancing Plant Properties for Biofuel Production

[0800] In one embodiment, the compositions, systems, and methods are used to alter the properties of the cell wall of plants to facilitate access by key hydrolyzing agents for a more efficient release of sugars for fermentation. By reducing the proportion of lignin in a plant the proportion of cellulose can be increased. In particular embodiments, lignin biosynthesis may be downregulated in the plant so as to increase fermentable carbohydrates.

[0801] In some examples, one or more lignin biosynthesis genes may be down regulated. Examples of such genes include 4-coumarate 3-hydroxylases (C3H), phenylalanine ammonia-lyases (PAL), cinnamate 4-hydroxylases (C4H), hydroxycinnamoyl transferases (HCT), caffeic acid O-methyltransferases (COMT), caffeoyl CoA 3-O-methyltransferases (CCoAOMT), ferulate 5-hydroxylases (F5H), cinnamyl alcohol dehydrogenases (CAD), cinnamoyl CoA-reductases (CCR), 4-coumarate-CoA ligases (4CL), monolignol-lignin-specific glycosyltransferases, and aldehyde dehydrogenases (ALDH), and those described in WO 2008064289.

[0802] In some examples, plant mass that produces lower level of acetic acid during fermentation may be reduced. To this end, genes involved in polysaccharide acetylation (e.g., Cas1L and those described in WO 2010096488) may be inactivated.

### Other Microorganisms for Oils and Biofuel Production

[0803] In one embodiment, microorganisms other than plants may be used for production of oils and biofuels using the compositions, systems, and methods herein. Examples of the microorganisms include those of the genus of Escherichia, Bacillus, Lactobacillus, Rhodococcus, Synechococcus, Synechoystis, Pseudomonas, Aspergillus, Trichoderma, Neurospora, Fusarium, Humicola, Rhizomucor, Kluyveromyces, Pichia, Mucor, Myceliophtora, Penicillium, Phanerochaete, Pleurotus, Trametes, Chrysosporium, Saccharomyces, Stenotrophamonas, Schizosaccharomyces, Yarrowia, or Streptomyces.

### Plant Cultures and Regeneration

[0804] In one embodiment, the modified plants or plant cells may be cultured to regenerate a whole plant which possesses the transformed or modified genotype and thus the desired phenotype. Examples of regeneration techniques include those relying on manipulation of certain phytohormones in a tissue culture growth medium, relying on a biocide and/or herbicide marker which has been introduced together with the desired nucleotide sequences, obtaining from cultured protoplasts, plant callus, explants, organs, pollens, embryos, or parts thereof.

### Detecting Modifications in the Plant Genome-Selectable Markers

[0805] When the compositions, systems, and methods are used to modify a plant, suitable methods may be used to confirm and detect the modification made in the plant. In some examples, when a variety of modifications are made, one or more desired modifications or traits resulting from the modifications may be selected and detected. The detection and confirmation may be performed by biochemical and molecular biology techniques such as Southern analysis, PCR, Northern blot, S1 RNase protection, primer-extension or reverse transcriptase-PCR, enzymatic assays, ribozyme activity, gel electrophoresis, Western blot, immunoprecipitation, enzyme-linked immunoassays, in situ hybridization, enzyme staining, and immunostaining.

[0806] In some cases, one or more markers, such as selectable and detectable markers, may be introduced to the plants. Such markers may be used for selecting, monitoring, isolating cells and plants with desired modifications and traits. A selectable marker can confer positive or negative selection and is conditional or non-conditional on the presence of external substrates. Examples of such markers include genes and proteins that confer resistance to antibiotics, such as hygromycin (hpt) and kanamycin (nptII), and genes that confer resistance to herbicides, such as phosphinothricin (bar) and chlorosulfuron (als), enzyme capable of producing or processing a colored substances (e.g., the β-glucuronidase, luciferase, B or C1 genes).

### Applications in Fungi

[0807] The compositions, systems, and methods described herein can be used to perform efficient and cost-effective gene or genome interrogation or editing or manipulation in fungi or fungal cells, such as yeast. The approaches and applications in plants may be applied to fungi as well.

[0808] A fungal cell may be any type of eukaryotic cell within the kingdom of fungi, such as phyla of Ascomycota, Basidiomycota, Blastocladiomycota, Chytridiomycota, Glomeromycota, Microsporidia, and Neocallimastigomycota. Examples of fungi or fungal cells in include yeasts, molds, and filamentous fungi.

[0809] In one embodiment, the fungal cell is a yeast cell. A yeast cell refers to any fungal cell within the phyla Ascomycota and Basidiomycota. Examples of yeasts include budding yeast, fission yeast, and mold, S. cerervisiae, Kluyveromyces marxianus, Issatchenkia orientalis, Candida spp. (e.g., Candida albicans), Yarrowia spp. (e.g., Yarrowia lipolytica), Pichia spp. (e.g., Pichia pastoris), Kluyveromyces spp. (e.g., Kluyveromyces lactis and Kluyveromyces marxianus), Neurospora spp. (e.g., Neurospora crassa), Fusarium spp. (e.g., Fusarium oxysporum), and Issatchenkia spp. (e.g., Issatchenkia orientalis, Pichia kudriavzevii and Candida acidothermophilum).

[0810] In one embodiment, the fungal cell is a filamentous fungal cell, which grow in filaments, e.g., hyphae or mycelia. Examples of filamentous fungal cells include Aspergillus spp. (e.g., Aspergillus niger), Trichoderma spp. (e.g., Trichoderma reesei), Rhizopus spp. (e.g., Rhizopus oryzae), and Mortierella spp. (e.g., Mortierella isabellina).

[0811] In one embodiment, the fungal cell is of an industrial strain. Industrial strains include any strain of fungal cell used in or isolated from an industrial process, e.g., production of a product on a commercial or industrial scale. Industrial strain may refer to a fungal species that is typically used in an industrial process, or it may refer to an isolate of a fungal species that may be also used for non-industrial purposes (e.g., laboratory research). Examples of industrial processes include fermentation (e.g., in production of food or beverage products), distillation, biofuel production, production of a compound, and production of a polypeptide. Examples of industrial strains include, without limitation, JAY270 and ATCC4124.

[0812] In one embodiment, the fungal cell is a polyploid cell whose genome is present in more than one copy. Polyploid cells include cells naturally found in a polyploid state, and cells that has been induced to exist in a polyploid state (e.g., through specific regulation, alteration, inactivation, activation, or modification of meiosis, cytokinesis, or DNA replication). A polyploid cell may be a cell whose entire genome is polyploid, or a cell that is polyploid in a particular genomic locus of interest. In some examples, the abundance of nucleic acid component molecule may more often be a rate-limiting component in genome engineering of polyploid cells than in haploid cells, and thus the methods using the composition described herein may take advantage of using certain fungal cell types.

[0813] In one embodiment, the fungal cell is a diploid cell, whose genome is present in two copies. Diploid cells include cells naturally found in a diploid state, and cells that have been induced to exist in a diploid state (e.g., through specific regulation, alteration, inactivation, activation, or modification of meiosis, cytokinesis, or DNA replication). A diploid cell may refer to a cell whose entire genome is diploid, or it may refer to a cell that is diploid in a particular genomic locus of interest.

[0814] In one embodiment, the fungal cell is a haploid cell, whose genome is present in one copy. Haploid cells include cells naturally found in a haploid state, or cells that have been induced to exist in a haploid state (e.g., through specific regulation, alteration, inactivation, activation, or modification of meiosis, cytokinesis, or DNA replication). A haploid cell may refer to a cell whose entire genome is haploid, or it may refer to a cell that is haploid in a particular genomic locus of interest.

[0815] The compositions and systems, and nucleic acid encoding thereof may be introduced to fungi cells using the delivery systems and methods herein. Examples of delivery systems include lithium acetate treatment, bombardment, electroporation, and those described in Kawai et al., 2010, Bioeng Bugs. 2010 November-December; 1(6):395-403.

[0816] In some examples, a yeast expression vector (e.g., those with one or more regulatory elements) may be used. Examples of such vectors include a centromeric (CEN) sequence, an autonomous replication sequence (ARS), a promoter, such as an RNA Polymerase III promoter, operably linked to a sequence or gene of interest, a terminator such as an RNA polymerase III terminator, an origin of replication, and a marker gene (e.g., auxotrophic, antibiotic, or other selectable markers). Examples of expression vectors for use in yeast may include plasmids, yeast artificial chromosomes, 2u plasmids, yeast integrative plasmids, yeast replicative plasmids, shuttle vectors, and episomal plasmids.

### Biofuel and Materials Production by Fungi

[0817] In one embodiment, the compositions, systems, and methods may be used for generating modified fungi for biofuel and material productions. For instance, the modified fungi for production of biofuel or biopolymers from fermentable sugars and optionally to be able to degrade plant-derived lignocellulose derived from agricultural waste as a source of fermentable sugars. Foreign genes required for biofuel production and synthesis may be introduced into fungi. In some examples, the genes may encode enzymes involved in the conversion of pyruvate to ethanol or another product of interest, degrade cellulose (e.g., cellulase), endogenous metabolic pathways which compete with the biofuel production pathway.

[0818] In some examples, the compositions, systems, and methods may be used for generating and/or selecting yeast strains with improved xylose or cellobiose utilization, isoprenoid biosynthesis, and/or lactic acid production. One or more genes involved in the metabolism and synthesis of these compounds may be modified and/or introduced to yeast cells. Examples of the methods and genes include lactate dehydrogenase, PDC1 and PDC5, and those described in Ha, S. J., et al. (2011) Proc. Natl. Acad. Sci. USA 108(2):504-9 and Galazka, J. M., et al. (2010) Science 330(6000):84-6; Jakočiūnas T et al., Metab Eng. 2015 March; 28:213-222; Stovicek V, et al., FEMS Yeast Res. 2017 Aug. 1; 17(5).

### Improved Plants and Yeast Cells

[0819] The present disclosure further provides improved plants and fungi. The improved and fungi may comprise one or more genes introduced, and/or one or more genes modified by the compositions, systems, and methods herein. The improved plants and fungi may have increased food or feed production (e.g., higher protein, carbohydrate, nutrient or vitamin levels), oil and biofuel production (e.g., methanol, ethanol), tolerance to pests, herbicides, drought, low or high temperatures, excessive water, etc.

[0820] The plants or fungi may have one or more parts that are improved, e.g., leaves, stems, roots, tubers, seeds, endosperm, ovule, and pollen. The parts may be viable, nonviable, regeneratable, and/or non-regeneratable.

[0821] The improved plants and fungi may include gametes, seeds, embryos, either zygotic or somatic, progeny and/or hybrids of improved plants and fungi. The progeny may be a clone of the produced plant or fungi, or may result from sexual reproduction by crossing with other individuals of the same species to introgress further desirable traits into their offspring. The cell may be in vivo or ex vivo in the cases of multicellular organisms, particularly plants.

### Further Applications in Plants

[0822] Further applications of the compositions, systems, and methods on plants and fungi include visualization of genetic element dynamics (e.g., as described in Chen B, et al., Cell. 2013 Dec. 19; 155(7):1479-91), targeted gene disruption positive-selection in vitro and in vivo (as described in Malina A et al., Genes Dev. 2013 Dec. 1; 27(23):2602-14), epigenetic modification such as using fusion of TnpB polypeptide and histone-modifying enzymes (e.g., as described in Rusk N, Nat Methods. 2014 January; 11(1):28), identifying transcription regulators (e.g., as described in Waldrip Z J, Epigenetics. 2014 September; 9(9):1207-11), anti-virus treatment for both RNA and DNA viruses (e.g., as described in Price A A, et al., Proc Natl Acad Sci USA. 2015 May 12; 112(19):6164-9; Ramanan V et al., Sci Rep. 2015 Jun. 2; 5:10833), alteration of genome complexity such as chromosome numbers (e.g., as described in Karimi-Ashtiyani R et al., Proc Natl Acad Sci USA. 2015 Sep. 8; 112(36):11211-6; Anton T, et al., Nucleus. 2014 March-April; 5(2):163-72), self-cleavage of the composition for controlled inactivation/activation (e.g., as described Sugano S S et al., Plant Cell Physiol. 2014 March; 55(3):475-81), multiplexed gene editing (as described in Kabadi A M et al., Nucleic Acids Res. 2014 Oct. 29; 42(19):e147), development of kits for multiplex genome editing (as described in Xing H L et al., BMC Plant Biol. 2014 Nov. 29; 14:327), starch production (as described in Hebelstrup K H et al., Front Plant Sci. 2015 Apr. 23; 6:247), targeting multiple genes in a family or pathway (e.g., as described in Ma X et al., Mol Plant. 2015 August; 8(8):1274-84), regulation of non-coding genes and sequences (e.g., as described in Lowder L G, et al., Plant Physiol. 2015 October; 169(2):971-85), editing genes in trees (e.g., as described in Belhaj K et al., Plant Methods. 2013 Oct. 11; 9(1):39; Harrison M M, et al., Genes Dev. 2014 Sep. 1; 28(17):1859-72; Zhou X et al., New Phytol. 2015 October; 208(2):298-301), introduction of mutations for resistance to host-specific pathogens and pests.

[0823] Additional examples of modifications of plants and fungi that may be performed using the compositions, systems, and methods include analogous modifications described in International Patent Publication Nos. WO2016/099887, WO2016/025131, WO2016/073433, WO2017/066175, WO2017/100158, WO 2017/105991, WO2017/106414, WO2016/100272, WO2016/100571, WO 2016/100568, WO 2016/100562, and WO 2017/019867.

### Applications in Non-Human Animals

[0824] The compositions, systems, and methods may be used to study and modify non-human animals, e.g., introducing desirable traits and disease resilience, treating diseases, facilitating breeding, etc. In one embodiment, the compositions, systems, and methods may be used to improve breeding and introducing desired traits, e.g., increasing the frequency of trait-associated alleles, introgression of alleles from other breeds/species without linkage drag, and creation of de novo favorable alleles. Genes and other genetic elements that can be targeted may be screened and identified. Examples of application and approaches include those described in Tait-Burkard C, et al., Livestock 2.0-genome editing for fitter, healthier, and more productive farmed animals. Genome Biol. 2018 Nov. 26; 19(1):204; Lillico S, Agricultural applications of genome editing in farmed animals. Transgenic Res. 2019 August; 28(Suppl 2):57-60; Houston R D, et al., Harnessing genomics to fast-track genetic improvement in aquaculture. Nat Rev Genet. 2020 Apr. 16. doi: 10.1038/s41576-020-0227-y, which are incorporated herein by reference in their entireties. Applications described in other sections such as therapeutic, diagnostic, etc. can also be used on the animals herein.

[0825] The compositions, systems, and methods may be used on animals such as fish, amphibians, reptiles, mammals, and birds. The animals may be farm and agriculture animals, or pets. Examples of farm and agriculture animals include horses, goats, sheep, swine, cattle, llamas, alpacas, and birds, e.g., chickens, turkeys, ducks, and geese. The animals may be a non-human primate, e.g., baboons, capuchin monkeys, chimpanzees, lemurs, macaques, marmosets, tamarins, spider monkeys, squirrel monkeys, and vervet monkeys. Examples of pets include dogs, cats, horses, wolfs, rabbits, ferrets, gerbils, hamsters, chinchillas, fancy rats, guinea pigs, canaries, parakeets, and parrots.

[0826] In one embodiment, one or more genes may be introduced (e.g., overexpressed) in the animals to obtain or enhance one or more desired traits. Growth hormones, insulin-like growth factors (IGF-1) may be introduced to increase the growth of the animals, e.g., pigs or salmon (such as described in Pursel V G et al., J Reprod Fertil Suppl. 1990; 40:235-45; Waltz E, Nature. 2017; 548:148). Fat-1 gene (e.g., from C elegans) may be introduced for production of larger ratio of n-3 to n-6 fatty acids may be induced, e.g., in pigs (such as described in Li M, et al., Genetics. 2018; 8:1747-54). Phytase (e.g., from E coli) xylanase (e.g., from Aspergillus niger), beta-glucanase (e.g., from bacillus lichenformis) may be introduced to reduce the environmental impact through phosphorous and nitrogen release reduction, e.g., in pigs (such as described in Golovan S P, et al., Nat Biotechnol. 2001; 19:741-5; Zhang X et al., elife. 2018). snucleic acid component decoy may be introduced to induce avian influenza resilience e.g., in chicken (such as described in Lyall et al., Science. 2011; 331:223-6). Lysozyme or lysostaphin may be introduced to induce mastitis resilience e.g., in goat and cow (such as described in Maga E A et al., Foodborne Pathog Dis. 2006; 3:384-92; Wall R J, et al., Nat Biotechnol. 2005; 23:445-51). Histone deacetylase such as HDAC6 may be introduced to induce PRRSV resilience, e.g., in pig (such as described in Lu T., et al., PLOS One. 2017; 12:e0169317). CD163 may be modified (e.g., inactivated or removed) to introduce PRRSV resilience in pigs (such as described in Prather R S et al., Sci Rep. 2017 Oct. 17; 7(1):13371). Similar approaches may be used to inhibit or remove viruses and bacteria (e.g., Swine Influenza Virus (SIV) strains which include influenza C and the subtypes of influenza A known as HIN1, H1N2, H2N1, H3N1, H3N2, and H2N3, as well as pneumonia, meningitis, and oedema) that may be transmitted from animals to humans.

[0827] In one embodiment, one or more genes may be modified or edited for disease resistance and production traits. Myostatin (e.g., GDF8) may be modified to increase muscle growth, e.g., in cow, sheep, goat, catfish, and pig (such as described in Crispo M et al., PLOS One. 2015; 10:e0136690; Wang X, et al., Anim Genet. 2018; 49:43-51; Khalil K, et al., Sci Rep. 2017; 7:7301; Kang J-D, et al., RSC Adv. 2017; 7:12541-9). Pc POLLED may be modified to induce horlessness, e.g., in cow (such as described in Carlson D F et al., Nat Biotechnol. 2016; 34:479-81). KISS1R may be modified to induce boretaint (hormone release during sexual maturity leading to undesired meat taste), e.g., in pigs. Dead end protein (dnd) may be modified to induce sterility, e.g., in salmon (such as described in Wargelius A, et al., Sci Rep. 2016; 6:21284). Nano2 and DDX may be modified to induce sterility (e.g., in surrogate hosts), e.g., in pigs and chicken (such as described Park K-E, et al., Sci Rep. 2017; 7:40176; Taylor L et al., Development. 2017; 144:928-34). CD163 may be modified to induce PRRSV resistance, e.g., in pigs (such as described in Whitworth K M, et al., Nat Biotechnol. 2015; 34:20-2). RELA may be modified to induce ASFV resilience, e.g., in pigs (such as described in Lillico S G, et al., Sci Rep. 2016; 6:21645). CD18 may be modified to induce Mannheimia (Pasteurella) haemolytica resilience, e.g., in cows (such as described in Shanthalingam S, et al., roc Natl Acad Sci USA. 2016; 113:13186-90). NRAMP1 may be modified to induce tuberculosis resilience, e.g., in cows (such as described in Gao Y et al., Genome Biol. 2017; 18:13). Endogenous retrovirus genes may be modified or removed for xenotransplantation such as described in Yang L, et al. Science. 2015; 350:1101-4; Niu D et al., Science. 2017; 357:1303-7). Negative regulators of muscle mass (e.g., Myostatin) may be modified (e.g., inactivated) to increase muscle mass, e.g., in dogs (as described in Zou Q et al., J Mol Cell Biol. 2015 December; 7(6):580-3).

[0828] Animals such as pigs with severe combined immunodeficiency (SCID) may generated (e.g., by modifying RAG2) to provide useful models for regenerative medicine, xenotransplantation (discussed also elsewhere herein), and tumor development. Examples of methods and approaches include those described Lee K, et al., Proc Natl Acad Sci USA. 2014 May 20; 111(20):7260-5; and Schomberg et al. FASEB Journal, April 2016; 30(1):Suppl 571.1.

[0829] SNPs in the animals may be modified. Examples of methods and approaches include those described Tan W. et al., Proc Natl Acad Sci USA. 2013 Oct. 8; 110(41):16526-31; Mali P, et al., Science. 2013 Feb. 15; 339(6121):823-6.

[0830] Stem cells (e.g., induced pluripotent stem cells) may be modified and differentiated into desired progeny cells, e.g., as described in Heo Y T et al., Stem Cells Dev. 2015 Feb. 1; 24(3):393-402.

[0831] Profile analysis (such as Igenity) may be performed on animals to screen and identify genetic variations related to economic traits. The genetic variations may be modified to introduce or improve the traits, such as carcass composition, carcass quality, maternal and reproductive traits, and average daily gain.

### Detection Compositions and Methods of Detection

[0832] In another aspect, embodiments disclosed herein are directed to polynucleotide detection compositions, systems, and methods. The detection composition may comprise any of the TnpB polypeptides and any one or more ωRNAs discussed above. In the addition, the compositions and system may comprise a detection construct. In one example embodiment, the detection construct comprises at least a portion of single-stranded polynucleotide. The one or more ωRNAs are configured to bind a target sequence on a target polypeptide. Binding of the TnpB complex to the target sequence activates TnpB cleavage activity and may further activate TnpB collateral activity whereby TnpB subsequently cleaves non-target single-stranded polynucleotides in an ωRNA-independent fashion. Accordingly, the detection construct can be configured so that a detectable signal is generated upon cleavage of the single-stranded portion of the detection constructs thereby indicating the present of the target sequence in a sample. Example detection constructs are discussed in further detail below. In further example embodiments, the compositions may further comprise amplification reagents. Amplification reagents may comprise primers and polymerase and/or reverse transcriptases needed to amplify the target sequence. In on example embodiment, the amplification reagents are isothermal amplification reagents. In other example embodiments, the compositions and systems may further comprise quick extraction solutions that allow for detection of target sequences in crude samples or with minimal purification prior to amplification and/or detection.

### Detection Construct

[0833] The systems and methods described herein comprise a detection construct. As used herein, a “detection construct” refers to a molecule that can be cleaved or otherwise deactivated by an activated TnpB system protein described herein. The term “detection construct” may also be referred to in the alternative as a “masking construct.” Depending on the nuclease activity of the TnpB protein and the methods utilized, the masking construct may be a RNA-based masking construct or a DNA-based masking construct. The Nucleic Acid-based masking constructs comprises a nucleic acid element that is cleavable by a TnpB protein. Cleavage of the nucleic acid element releases agents or produces conformational changes that allow a detectable signal to be produced. Example constructs demonstrating how the nucleic acid element may be used to prevent or mask generation of detectable signal are described below and embodiments of the invention comprise variants of the same. Prior to cleavage, or when the masking construct is in an ‘active’ state, the masking construct blocks the generation or detection of a positive detectable signal. In one embodiment, detection constructs are designed for cutting motifs of particular TnpB proteins.

[0834] It will be understood that in certain example embodiments a minimal background signal may be produced in the presence of an active masking construct. A positive detectable signal may be any signal that can be detected using optical, fluorescent, chemiluminescent, electrochemical, or other detection methods known in the art. The term “positive detectable signal” is used to differentiate from other detectable signals that may be detectable in the presence of the masking construct. For example, in one embodiment a first signal may be detected when the masking agent is present or when a TnpB system has not been activated (i.e., a negative detectable signal), which then converts to a second signal (e.g., the positive detectable signal) upon detection of the target molecules and cleavage or deactivation of the masking agent, or upon activation of the TnpB protein. The positive detectable signal, then, is a signal detected upon activation of the TnpB protein, and may be, in a colorimetric or fluorescent assay, a decrease in fluorescence or color relative to a control or an increase in fluorescence or color relative to a control, depending on the configuration of the lateral flow substrate, and as described further herein.

[0835] In certain example embodiments, the masking construct may comprise a HCR initiator sequence and a cutting motif, or a cleavable structural element, such as a loop or hairpin, that prevents the initiator from initiating the HCR reaction. The cutting motif may be preferentially cut by one of the activated TnpB effector proteins. Upon cleavage of the cutting motif or structure element by an activated TnpB protein, the initiator is then released to trigger the HCR reaction, detection thereof indicating the presence of one or more targets in the sample. In certain example embodiments, the masking construct comprises a hairpin with an RNA loop. When an activated TnpB protein cuts the RNA loop, the initiator can be released to trigger the HCR reaction.

[0836] In certain example embodiments, the masking construct may suppress generation of a gene product. The gene product may be encoded by a reporter construct that is added to the sample. The masking construct may be an interfering RNA involved in an RNA interference pathway, such as a short hairpin RNA (shRNA) or small interfering RNA (siRNA). The masking construct may also comprise microRNA (miRNA). While present, the masking construct suppresses expression of the gene product. The gene product may be a fluorescent protein or other RNA transcript or proteins that would otherwise be detectable by a labeled probe, aptamer, or antibody but for the presence of the masking construct. Upon activation of the effector protein the masking construct is cleaved or otherwise silenced allowing for expression and detection of the gene product as the positive detectable signal. In preferred embodiments, the masking constructs comprise two or more detectable signals, for example, fluorescent signals, that can be read on different channels of a fluorimeter.

[0837] In specific embodiments, the masking construct comprises a silencing RNA that suppresses generation of a gene product encoded by a reporting construct, wherein the gene product generates the detectable positive signal when expressed.

[0838] In certain example embodiments, the masking construct may sequester one or more reagents needed to generate a detectable positive signal such that release of the one or more reagents from the masking construct results in generation of the detectable positive signal. The one or more reagents may combine to produce a colorimetric signal, a chemiluminescent signal, a fluorescent signal, or any other detectable signal and may comprise any reagents known to be suitable for such purposes. In certain example embodiments, the one or more reagents are sequestered by RNA aptamers that bind the one or more reagents. The one or more reagents are released when the effector protein is activated upon detection of a target molecule and the RNA or DNA aptamers are degraded.

[0839] In certain example embodiments, the masking construct may be immobilized on a solid substrate in an individual discrete volume (defined further below) and sequesters a single reagent. For example, the reagent may be a bead comprising a dye. When sequestered by the immobilized reagent, the individual beads are too diffuse to generate a detectable signal, but upon release from the masking construct are able to generate a detectable signal, for example by aggregation or simple increase in solution concentration. In certain example embodiments, the immobilized masking agent is an RNA- or DNA-based aptamer that can be cleaved by the activated effector protein upon detection of a target molecule.

[0840] In certain other example embodiments, the masking construct binds to an immobilized reagent in solution thereby blocking the ability of the reagent to bind to a separate labeled binding partner that is free in solution. Thus, upon application of a washing step to a sample, the labeled binding partner can be washed out of the sample in the absence of a target molecule. However, if the effector protein is activated, the masking construct is cleaved to a degree sufficient to interfere with the ability of the masking construct to bind the reagent thereby allowing the labeled binding partner to bind to the immobilized reagent. Thus, the labeled binding partner remains after the wash step indicating the presence of the target molecule in the sample. In certain aspects, the masking construct that binds the immobilized reagent is a DNA or RNA aptamer. The immobilized reagent may be a protein and the labeled binding partner may be a labeled antibody. Alternatively, the immobilized reagent may be streptavidin and the labeled binding partner may be labeled biotin. The label on the binding partner used in the above embodiments may be any detectable label known in the art. In addition, other known binding partners may be used in accordance with the overall design described herein.

[0841] In certain example embodiments, the masking construct may comprise a ribozyme. Ribozymes are RNA molecules having catalytic properties. Ribozymes, both naturally and engineered, comprise, or consist of RNA that may be targeted by the effector proteins disclosed herein. The ribozyme may be selected or engineered to catalyze a reaction that either generates a negative detectable signal or prevents generation of a positive control signal. Upon deactivation of the ribozyme by the activated effector protein the reaction generating a negative control signal, or preventing generation of a positive detectable signal, is removed thereby allowing a positive detectable signal to be generated. In one example embodiment, the ribozyme may catalyze a colorimetric reaction causing a solution to appear as a first color. When the ribozyme is deactivated, the solution then turns to a second color, the second color being the detectable positive signal. An example of how ribozymes can be used to catalyze a colorimetric reaction are described in Zhao et al. “Signal amplification of glucosamine-6-phosphate based on ribozyme glmS,” Biosens Bioelectron. 2014; 16:337-42, and provide an example of how such a system could be modified to work in the context of the embodiments disclosed herein. Alternatively, ribozymes, when present can generate cleavage products of, for example, RNA transcripts. Thus, detection of a positive detectable signal may comprise detection of non-cleaved RNA transcripts that are only generated in the absence of the ribozyme.

[0842] In one embodiment, the masking construct may be a ribozyme that generates a negative detectable signal, and wherein a positive detectable signal is generated when the ribozyme is deactivated.

[0843] In certain example embodiments, the one or more reagents is a protein, such as an enzyme, capable of facilitating generation of a detectable signal, such as a colorimetric, chemiluminescent, or fluorescent signal, that is inhibited or sequestered such that the protein cannot generate the detectable signal by the binding of one or more DNA or RNA aptamers to the protein. Upon activation of the effector proteins disclosed herein, the DNA or RNA aptamers are cleaved or degraded to an extent that they no longer inhibit the protein's ability to generate the detectable signal. In certain example embodiments, the aptamer is a thrombin inhibitor aptamer. In certain example embodiments the thrombin inhibitor aptamer has a sequence of GGGAACAAAGCUGAAGUACUUACCC (SEQ ID NO: 2359). When this aptamer is cleaved, thrombin will become active and will cleave a peptide colorimetric or fluorescent substrate. In certain example embodiments, the colorimetric substrate is para-nitroanilide (pNA) covalently linked to the peptide substrate for thrombin. Upon cleavage by thrombin, pNA is released and becomes yellow in color and easily visible to the eye. In certain example embodiments, the fluorescent substrate is 7-amino-4-methylcoumarin a blue fluorophore that can be detected using a fluorescence detector. Inhibitory aptamers may also be used for horseradish peroxidase (HRP), beta-galactosidase, or calf alkaline phosphatase (CAP) and within the general principals laid out above.

[0844] In one embodiment, RNAse or DNAse activity is detected colorimetrically via cleavage of enzyme-inhibiting aptamers. One potential mode of converting DNAse or RNAse activity into a colorimetric signal is to couple the cleavage of a DNA or RNA aptamer with the re-activation of an enzyme that is capable of producing a colorimetric output. In the absence of RNA or DNA cleavage, the intact aptamer will bind to the enzyme target and inhibit its activity. The advantage of this readout system is that the enzyme provides an additional amplification step: once liberated from an aptamer via collateral activity (e.g., TnpB collateral activity), the colorimetric enzyme will continue to produce colorimetric product, leading to a multiplication of signal.

[0845] In one embodiment, an existing aptamer that inhibits an enzyme with a colorimetric readout is used. Several aptamer/enzyme pairs with colorimetric readouts exist, such as thrombin, protein C, neutrophil elastase, and subtilisin. These proteases have colorimetric substrates based upon pNA and are commercially available. In one embodiment, a novel aptamer targeting a common colorimetric enzyme is used. Common and robust enzymes, such as beta-galactosidase, horseradish peroxidase, or calf intestinal alkaline phosphatase, could be targeted by engineered aptamers designed by selection strategies such as SELEX. Such strategies allow for quick selection of aptamers with nanomolar binding efficiencies and could be used for the development of additional enzyme/aptamer pairs for colorimetric readout.

[0846] In one embodiment, the masking construct may be a DNA or RNA aptamer and/or may comprise a DNA or RNA-tethered inhibitor.

[0847] In one embodiment, the masking construct may comprise a DNA or RNA oligonucleotide to which a detectable ligand and a masking component are attached.

[0848] In one embodiment, RNAse or DNase activity is detected colorimetrically via cleavage of RNA-tethered inhibitors. Many common colorimetric enzymes have competitive, reversible inhibitors: for example, beta-galactosidase can be inhibited by galactose. Many of these inhibitors are weak, but their effect can be increased by increases in local concentration. By linking local concentration of inhibitors to DNase RNAse activity, colorimetric enzyme and inhibitor pairs can be engineered into DNase and RNAse sensors. The colorimetric DNase or RNAse sensor based upon small-molecule inhibitors involves three components: the colorimetric enzyme, the inhibitor, and a bridging RNA or DNA that is covalently linked to both the inhibitor and enzyme, tethering the inhibitor to the enzyme. In the uncleaved configuration, the enzyme is inhibited by the increased local concentration of the small molecule; when the DNA or RNA is cleaved (e.g., by TnpB collateral cleavage), the inhibitor will be released, and the colorimetric enzyme will be activated.

[0849] In one embodiment, the aptamer or DNA- or RNA-tethered inhibitor may sequester an enzyme, wherein the enzyme generates a detectable signal upon release from the aptamer or DNA or RNA tethered inhibitor by acting upon a substrate. In one embodiment, the aptamer may be an inhibitor aptamer that inhibits an enzyme and prevents the enzyme from catalyzing generation of a detectable signal from a substance. In one embodiment, the DNA- or RNA-tethered inhibitor may inhibit an enzyme and may prevent the enzyme from catalyzing generation of a detectable signal from a substrate.

[0850] In one embodiment, RNAse activity is detected colorimetrically via formation and/or activation of G-quadruplexes. G quadruplexes in DNA can complex with heme (iron (III)-protoporphyrin IX) to form a DNAzyme with peroxidase activity. When supplied with a peroxidase substrate (e.g., ABTS: (2,2′-Azinobis [3-ethylbenzothiazoline-6-sulfonic acid]-diammonium salt)), the G-quadruplex-heme complex in the presence of hydrogen peroxide causes oxidation of the substrate, which then forms a green color in solution. An example G-quadruplex forming DNA sequence is: GGGTAGGGCGGGTTGGGA (SEQ ID NO: 2360). By hybridizing an additional DNA or RNA sequence, referred to herein as a “staple,” to this DNA aptamer, formation of the G-quadraplex structure will be limited. Upon collateral activation, the staple will be cleaved allowing the G quadraplex to form and heme to bind. This strategy is particularly appealing because color formation is enzymatic, meaning there is additional amplification beyond collateral activation.

[0851] In one embodiment, the masking construct may comprise an RNA oligonucleotide designed to bind a G-quadruplex forming sequence, wherein a G-quadruplex structure is formed by the G-quadruplex forming sequence upon cleavage of the masking construct, and wherein the G-quadruplex structure generates a detectable positive signal.

[0852] In certain example embodiments, the masking construct may be immobilized on a solid substrate in an individual discrete volume (defined further below) and sequesters a single reagent. For example, the reagent may be a bead comprising a dye. When sequestered by the immobilized reagent, the individual beads are too diffuse to generate a detectable signal, but upon release from the masking construct are able to generate a detectable signal, for example by aggregation or simple increase in solution concentration. In certain example embodiments, the immobilized masking agent is a DNA- or RNA-based aptamer that can be cleaved by the activated effector protein upon detection of a target molecule.

[0853] In one example embodiment, the masking construct comprises a detection agent that changes color depending on whether the detection agent is aggregated or dispersed in solution. For example, certain nanoparticles, such as colloidal gold, undergo a visible purple to red color shift as they move from aggregates to dispersed particles. Accordingly, in certain example embodiments, such detection agents may be held in aggregate by one or more bridge molecules. At least a portion of the bridge molecule comprises RNA or DNA. Upon activation of the effector proteins disclosed herein, the RNA or DNA portion of the bridge molecule is cleaved allowing the detection agent to disperse and resulting in the corresponding change in color. In certain example embodiments, the detection agent is a colloidal metal. The colloidal metal material may include water-insoluble metal particles or metallic compounds dispersed in a liquid, a hydrosol, or a metal sol. The colloidal metal may be selected from the metals in groups IA, IB, IIB and IIIB of the periodic table, as well as the transition metals, especially those of group VIII. Preferred metals include gold, silver, aluminum, ruthenium, zinc, iron, nickel, and calcium. Other suitable metals also include the following in all of their various oxidation states: lithium, sodium, magnesium, potassium, scandium, titanium, vanadium, chromium, manganese, cobalt, copper, gallium, strontium, niobium, molybdenum, palladium, indium, tin, tungsten, rhenium, platinum, and gadolinium. The metals are preferably provided in ionic form, derived from an appropriate metal compound, for example the A13+, Ru3+, Zn2+, Fe3+, Ni2+ and Ca2+ ions.

[0854] When the RNA or DNA bridge is cut by the activated TnpB polypeptide, the aforementioned color shift is observed. In certain example embodiments the particles are colloidal metals. In certain other example embodiments, the colloidal metal is a colloidal gold. In certain example embodiments, the colloidal nanoparticles are 15 nm gold nanoparticles (AuNPs). Due to the unique surface properties of colloidal gold nanoparticles, maximal absorbance is observed at 520 nm when fully dispersed in solution and appear red in color to the naked eye. Upon aggregation of AuNPs, they exhibit a red-shift in maximal absorbance and appear darker in color, eventually precipitating from solution as a dark purple aggregate. In certain example embodiments the nanoparticles are modified to include DNA linkers extending from the surface of the nanoparticle. Individual particles are linked together by single-stranded RNA (ssRNA) or single-stranded DNA (ssDNA) bridges that hybridize on each end to at least a portion of the DNA linkers. Thus, the nanoparticles will form a web of linked particles and aggregate, appearing as a dark precipitate. Upon activation of the TnpB polypeptides disclosed herein, the ssRNA or ssDNA bridge will be cleaved, releasing the AU NPS from the linked mesh and produce a visible red color. Example DNA linkers and bridge sequences are listed below. Thiol linkers on the end of the DNA linkers may be used for surface conjugation to the AuNPS. Other forms of conjugation may be used. In certain example embodiments, two populations of AuNPs may be generated, one for each DNA linker. This will help facilitate proper binding of the ssRNA bridge with proper orientation. In certain example embodiments, a first DNA linker is conjugated by the 3′ end while a second DNA linker is conjugated by the 5′ end.

[0855] In certain other example embodiments, the masking construct may comprise an RNA or DNA oligonucleotide to which are attached a detectable label and a masking agent of that detectable label. An example of such a detectable label/masking agent pair is a fluorophore and a quencher of the fluorophore. Quenching of the fluorophore can occur as a result of the formation of a non-fluorescent complex between the fluorophore and another fluorophore or non-fluorescent molecule. This mechanism is known as ground-state complex formation, static quenching, or contact quenching. Accordingly, the RNA or DNA oligonucleotide may be designed so that the fluorophore and quencher are in sufficient proximity for contact quenching to occur. Fluorophores and their cognate quenchers are known in the art and can be selected for this purpose by one having ordinary skill in the art. The particular fluorophore/quencher pair is not critical in the context of this invention, only that selection of the fluorophore/quencher pairs ensures masking of the fluorophore. Upon activation of the effector proteins disclosed herein, the RNA or DNA oligonucleotide is cleaved thereby severing the proximity between the fluorophore and quencher needed to maintain the contact quenching effect. Accordingly, detection of the fluorophore may be used to determine the presence of a target molecule in a sample.

[0856] In certain other example embodiments, the masking construct may comprise one or more RNA oligonucleotides to which are attached one or more metal nanoparticles, such as gold nanoparticles. In one embodiment, the masking construct comprises a plurality of metal nanoparticles crosslinked by a plurality of RNA or DNA oligonucleotides forming a closed loop. In one embodiment, the masking construct comprises three gold nanoparticles crosslinked by three RNA or DNA oligonucleotides forming a closed loop. In one embodiment, the cleavage of the RNA or DNA oligonucleotides by the TnpB protein leads to a detectable signal produced by the metal nanoparticles.

[0857] In certain other example embodiments, the masking construct may comprise one or more RNA or DNA oligonucleotides to which are attached one or more quantum dots. In one embodiment, the cleavage of the RNA or DNA oligonucleotides by the TnpB protein leads to a detectable signal produced by the quantum dots.

[0858] In one example embodiment, the masking construct may comprise a quantum dot. The quantum dot may have multiple linker molecules attached to the surface. At least a portion of the linker molecule comprises RNA or DNA. The linker molecule is attached to the quantum dot at one end and to one or more quenchers along the length or at terminal ends of the linker such that the quenchers are maintained in sufficient proximity for quenching of the quantum dot to occur. The linker may be branched. As above, the quantum dot/quencher pair is not critical, only that selection of the quantum dot/quencher pair ensures masking of the fluorophore. Quantum dots and their cognate quenchers are known in the art and can be selected for this purpose by one having ordinary skill in the art. Upon activation of the effector proteins disclosed herein, the RNA or DNA portion of the linker molecule is cleaved thereby eliminating the proximity between the quantum dot and one or more quenchers needed to maintain the quenching effect. In certain example embodiments the quantum dot is streptavidin conjugated. RNA or DNA are attached via biotin linkers and recruit quenching molecules with the sequences /5Biosg/UCUCGUACGUUC/3IAbRQSp/(SEQ ID NO: 2361) or /5Biosg/UCUCGUACGUUCUCUCGUACGUUC/3IAbRQSp/(SEQ ID NO: 2362) where/5Biosg/is a biotin tag and /31AbRQSp/ is an Iowa black quencher (Iowa Black FQ). Upon cleavage, by the activated effectors disclosed herein the quantum dot will fluoresce visibly.

[0859] In specific embodiments, the detectable ligand may be a fluorophore and the masking component may be a quencher molecule.

[0860] In a similar fashion, fluorescence energy transfer (FRET) may be used to generate a detectable positive signal. FRET is a non-radiative process by which a photon from an energetically excited fluorophore (i.e., “donor fluorophore”) raises the energy state of an electron in another molecule (i.e., “the acceptor”) to higher vibrational levels of the excited singlet state. The donor fluorophore returns to the ground state without emitting a fluoresce characteristic of that fluorophore. The acceptor can be another fluorophore or non-fluorescent molecule. If the acceptor is a fluorophore, the transferred energy is emitted as fluorescence characteristic of that fluorophore. If the acceptor is a non-fluorescent molecule the absorbed energy is loss as heat. Thus, in the context of the embodiments disclosed herein, the fluorophore/quencher pair is replaced with a donor fluorophore/acceptor pair attached to the oligonucleotide molecule. When intact, the masking construct generates a first signal (negative detectable signal) as detected by the fluorescence or heat emitted from the acceptor. Upon activation of the effector proteins disclosed herein the RNA oligonucleotide is cleaved and FRET is disrupted such that fluorescence of the donor fluorophore is now detected (positive detectable signal).

[0861] In certain example embodiments, the masking construct comprises the use of intercalating dyes which change their absorbance in response to cleavage of long RNAs or DNAs to short nucleotides. Several such dyes exist. For example, pyronine-Y will complex with RNA and form a complex that has an absorbance at 572 nm. Cleavage of the RNA results in loss of absorbance and a color change. Methylene blue may be used in a similar fashion, with changes in absorbance at 688 nm upon RNA cleavage. Accordingly, in certain example embodiments the masking construct comprises a RNA and intercalating dye complex that changes absorbance upon the cleavage of RNA by the effector proteins disclosed herein.

[0862] In certain example embodiments, the masking construct may comprise an initiator for an HCR reaction. See e.g., Dirks and Pierce. PNAS 101, 15275-15728 (2004). HCR reactions utilize the potential energy in two hairpin species. When a single-stranded initiator having a portion of complementary to a corresponding region on one of the hairpins is released into the previously stable mixture, it opens a hairpin of one species. This process, in turn, exposes a single-stranded region that opens a hairpin of the other species. This process, in turn, exposes a single stranded region identical to the original initiator. The resulting chain reaction may lead to the formation of a nicked double helix that grows until the hairpin supply is exhausted. Detection of the resulting products may be done on a gel or colorimetrically. Example colorimetric detection methods include, for example, those disclosed in Lu et al. “Ultra-sensitive colorimetric assay system based on the hybridization chain reaction-triggered enzyme cascade amplification ACS Appl Mater Interfaces, 2017, 9(1):167-175, Wang et al. “An enzyme-free colorimetric assay using hybridization chain reaction amplification and split aptamers” Analyst 2015, 150, 7657-7662, and Song et al. “Non-covalent fluorescent labeling of hairpin DNA probe coupled with hybridization chain reaction for sensitive DNA detection.” Applied Spectroscopy, 70(4): 686-694 (2016).

[0863] In certain example embodiments, the masking construct suppresses generation of a detectable positive signal until cleaved or modified by an activated TnpB protein. In one embodiment, the masking construct may suppress generation of a detectable positive signal by masking the detectable positive signal or generating a detectable negative signal instead.

### Amplification Reagents

[0864] In certain example embodiments, target RNAs and/or DNAs may be amplified prior to activating the CRISPR effector protein. Any suitable RNA or DNA amplification technique may be used. In certain example embodiments, the RNA or DNA amplification is an isothermal amplification. In certain example embodiments, the isothermal amplification may be nucleic-acid sequenced-based amplification (NASBA), recombinase polymerase amplification (RPA), loop-mediated isothermal amplification (LAMP), strand displacement amplification (SDA), helicase-dependent amplification (HDA), or nicking enzyme amplification reaction (NEAR). In certain example embodiments, non-isothermal amplification methods may be used which include, but are not limited to, PCR, multiple displacement amplification (MDA), rolling circle amplification (RCA), ligase chain reaction (LCR), or ramification amplification method (RAM).

[0865] In certain example embodiments, the RNA or DNA amplification is NASBA, which is initiated with reverse transcription of target RNA by a sequence-specific reverse primer to create a RNA/DNA duplex. RNase H is then used to degrade the RNA template, allowing a forward primer containing a promoter, such as the T7 promoter, to bind and initiate elongation of the complementary strand, generating a double-stranded DNA product. The RNA polymerase promoter-mediated transcription of the DNA template then creates copies of the target RNA sequence. Importantly, each of the new target RNAs can be detected by the guide RNAs thus further enhancing the sensitivity of the assay. Binding of the target RNAs by the guide RNAs then leads to activation of the CRISPR effector protein and the methods proceed as outlined above. The NASBA reaction has the additional advantage of being able to proceed under moderate isothermal conditions, for example at approximately 410C, making it suitable for systems and devices deployed for early and direct detection in the field and far from clinical laboratories.

[0866] In certain other example embodiments, a recombinase polymerase amplification (RPA) reaction may be used to amplify the target nucleic acids. RPA reactions employ recombinases which are capable of pairing sequence-specific primers with homologous sequence in duplex DNA. If target DNA is present, DNA amplification is initiated and no other sample manipulation such as thermal cycling or chemical melting is required. The entire RPA amplification system is stable as a dried formulation and can be transported safely without refrigeration. RPA reactions may also be carried out at isothermal temperatures with an optimum reaction temperature of 37-42° C. The sequence specific primers are designed to amplify a sequence comprising the target nucleic acid sequence to be detected. In certain example embodiments, an RNA polymerase promoter, such as a T7 promoter, is added to one of the primers. This results in an amplified double-stranded DNA product comprising the target sequence and an RNA polymerase promoter. After, or during, the RPA reaction, an RNA polymerase is added that will produce RNA from the double-stranded DNA templates. The amplified target RNA can then in turn be detected by the CRISPR effector system. In this way target DNA can be detected using the embodiments disclosed herein. RPA reactions can also be used to amplify target RNA. The target RNA is first converted to cDNA using a reverse transcriptase, followed by second strand DNA synthesis, at which point the RPA reaction proceeds as outlined above.

[0867] In an embodiment of the invention may comprise nickase-based amplification. The nicking enzyme may be a CRISPR protein. Accordingly, the introduction of nicks into dsDNA can be programmable and sequence-specific. FIG. 115 depicts an embodiment of the invention, which starts with two guides designed to target opposite strands of a dsDNA target. According to the invention, the nickase can be Cpf1, C2c1, Cas9 or any ortholog or CRISPR protein that cleaves or is engineered to cleave a single strand of a DNA duplex. The nicked strands may then be extended by a polymerase. In an embodiment, the locations of the nicks are selected such that extension of the strands by a polymerase is towards the central portion of the target duplex DNA between the nick sites. In one embodiment, primers are included in the reaction capable of hybridizing to the extended strands followed by further polymerase extension of the primers to regenerate two dsDNA pieces: a first dsDNA that includes the first strand Cpf1 guide site or both the first and second strand Cpf1 guide sites, and a second dsDNA that includes the second strand Cpf1 guide site or both the first and second strand Cprf guide sites. These pieces continue to be nicked and extended in a cyclic reaction that exponentially amplifies the region of the target between nicking sites.

[0868] The amplification can be isothermal and selected for temperature. In one embodiment, the amplification proceeds rapidly at 37 degrees. In other embodiments, the temperature of the isothermal amplification may be chosen by selecting a polymerase (e.g., Bsu, Bst, Phi29, klenow fragment etc.) operable at a different temperature.

[0869] Thus, wherease nicking isothermal amplification techniques use nicking enzymes with fixed sequence preference (e.g., in nicking enzyme amplification reaction or NEAR), which requires denaturing of the original dsDNA target to allow annealing and extension of primers that add the nicking substrate to the ends of the target, use of a CRISPR nickase wherein the nicking sites can be programed via guide RNAs means that no denaturing step is necessary, enabling the entire reaction to be truly isothermal. This also simplifies the reaction because these primers that add the nicking substrate are different than the primers that are used later in the reaction, meaning that NEAR requires two primer sets (i.e., 4 primers) while Cpf1 nicking amplification only requires one primer set (i.e., two primers). This makes nicking Cpf1 amplification much simpler and easier to operate without complicated instrumentation to perform the denaturation and then cooling to the isothermal temperature.

[0870] Accordingly, in certain example embodiments the systems disclosed herein may include amplification reagents. Different components or reagents useful for amplification of nucleic acids are described herein. For example, an amplification reagent as described herein may include a buffer, such as a Tris buffer. A Tris buffer may be used at any concentration appropriate for the desired application or use, for example including, but not limited to, a concentration of 1 mM, 2 mM, 3 mM, 4 mM, 5 mM, 6 mM, 7 mM, 8 mM, 9 mM, 10 mM, 11 mM, 12 mM, 13 mM, 14 mM, 15 mM, 25 mM, 50 mM, 75 mM, 1 M, or the like. One of skill in the art will be able to determine an appropriate concentration of a buffer such as Tris for use with the present invention.

[0871] Other components of a biological or chemical reaction may include a cell lysis component in order to break open or lyse a cell for analysis of the materials therein. A cell lysis component may include, but is not limited to, a detergent, a salt as described above, such as NaCl, KCl, ammonium sulfate [(NH4) 2SO4], or others. Detergents that may be appropriate for the invention may include Triton X-100, sodium dodecyl sulfate (SDS), CHAPS (3-[(3-cholamidopropyl)dimethylammonio]-1-propanesulfonate), ethyl trimethyl ammonium bromide, nonyl phenoxypolyethoxylethanol (NP-40). Concentrations of detergents may depend on the particular application and may be specific to the reaction in some cases. Amplification reactions may include dNTPs and nucleic acid primers used at any concentration appropriate for the invention, such as including, but not limited to, a concentration of 100 nM, 150 nM, 200 nM, 250 nM, 300 nM, 350 nM, 400 nM, 450 nM, 500 nM, 550 nM, 600 nM, 650 nM, 700 nM, 750 nM, 800 nM, 850 nM, 900 nM, 950 nM, 1 mM, 2 mM, 3 mM, 4 mM, 5 mM, 6 mM, 7 mM, 8 mM, 9 mM, 10 mM, 20 mM, 30 mM, 40 mM, 50 mM, 60 mM, 70 mM, 80 mM, 90 mM, 100 mM, 150 mM, 200 mM, 250 mM, 300 mM, 350 mM, 400 mM, 450 mM, 500 mM, or the like. Likewise, a polymerase useful in accordance with the invention may be any specific or general polymerase known in the art and useful or the invention, including Taq polymerase, Q5 polymerase, or the like.

[0872] In some embodiments, amplification reagents as described herein may be appropriate for use in hot-start amplification. Hot start amplification may be beneficial in some embodiments to reduce or eliminate dimerization of adaptor molecules or oligos, or to otherwise prevent unwanted amplification products or artifacts and obtain optimum amplification of the desired product. Many components described herein for use in amplification may also be used in hot-start amplification. In some embodiments, reagents or components appropriate for use with hot-start amplification may be used in place of one or more of the composition components as appropriate. For example, a polymerase or other reagent may be used that exhibits a desired activity at a particular temperature or other reaction condition. In some embodiments, reagents may be used that are designed or optimized for use in hot-start amplification, for example, a polymerase may be activated after transposition or after reaching a particular temperature. Such polymerases may be antibody-based or aptamer-based. Polymerases as described herein are known in the art. Examples of such reagents may include, but are not limited to, hot-start polymerases, hot-start dNTPs, and photo-caged dNTPs. Such reagents are known and available in the art. One of skill in the art will be able to determine the optimum temperatures as appropriate for individual reagents.

[0873] Amplification of nucleic acids may be performed using specific thermal cycle machinery or equipment and may be performed in single reactions or in bulk, such that any desired number of reactions may be performed simultaneously. In some embodiments, amplification may be performed using microfluidic or robotic devices, or may be performed using manual alteration in temperatures to achieve the desired amplification. In some embodiments, optimization may be performed to obtain the optimum reactions conditions for the particular application or materials. One of skill in the art will understand and be able to optimize reaction conditions to obtain sufficient amplification.

[0874] In one embodiment, detection of DNA with the methods or systems of the invention requires transcription of the (amplified) DNA into RNA prior to detection.

[0875] It will be evident that detection methods of the invention can involve nucleic acid amplification and detection procedures in various combinations. The nucleic acid to be detected can be any naturally occurring or synthetic nucleic acid, including but not limited to DNA and RNA, which may be amplified by any suitable method to provide an intermediate product that can be detected. Detection of the intermediate product can be by any suitable method including but not limited to binding and activation of a CRISPR protein which produces a detectable signal moiety by direct or collateral activity.

### LAMP-Based Isothermal Amplification

[0876] In certain example embodiments, the LAMP amplification reagents may include primers to SARS-COV2. LAMP reagents may further comprise colorimetric and/or fluorescent detection reagents, such as hydroxy napthol blue (see, e.g., Goto, M., et al., Colorimetric detection of loop-mediated isothermal amplification reaction by using hydroxy naphthol blue. Biotechniques, 2009. 46(3): p. 167-72.) leuco triphenylmethane dyes (see, e.g., Miyamoto, S., et al., Method for colorimetric detection of double-stranded nucleic acid using leuco triphenylmethane dyes. Anal Biochem, 2015. 473: p. 28-33) and pH-sensitive dyes (see, e.g., Tanner, N. A., Y. Zhang, and T. C. Evans, Jr., Visual detection of isothermal nucleic acid amplification using pH-sensitive dyes. Biotechniques, 2015. 58(2): p. 59-68); as well as fluorescent detection (see, e.g., Yu et al., Clinical Chemistry, hvaa102, doi:10.1093/clinchem/hvaa102 12 May 2020), including use of quenching probes (see, e.g., Shirato et al., J Virol Methods. 2018 August; 258:41-48. doi: 10.1016/j.jviromet.2018.05.006). An overview of LAMP methods, including OSD-LAMP, for sequence-specific detection is described in Becherer et al., Anal. Methods, 2020, 12, 717-746, doi: 10.1039/C9AY02246E, incorporated herein by reference.

[0877] In embodiments, the LAMP amplification reagents can comprise oligonucleotide strand displacement (OSD) probes. As used herein, oligonucleotide strand displacement probes are also referred to herein as oligonucleotide strand exchange probes or one-step strand displacement probes. The general concept of the use of OSD exchange is depicted in FIG. 1 of Bhadra et al., High-surety isothermal amplification and detection of SARS-CoV-2, including with crude enzymes, doi:10.1101/2020.04.13.039941. OSD probes rely on the binding enthalpy between the target-binding probe and amplicon of the LAMP reaction yielding a strand exchange reaction, leading to an easily read change in fluorescent signal. As a result, the results of a LAMP reaction can be visually or optically read fluorogenic OSD probes.

[0878] In an aspect, the OSD probes comprise a sequence specific for a target molecule. The OSD probes may comprise a pre-hybridized nucleic acid sequence, strand wherein the target sequence is 5, 6, 7, 8, 9, 10, 11, 12 or 13 nucleotides longer than the strand to which it is hybridized, allowing for sequence-specific interaction with a complementary target, with the OSD undergoing strand exchange and yielding a change in fluorescent signal.

[0879] In an aspect, the OSD probes are provided at a concentration of about 50 nM to 200 nM, about 75 nM to 150 nM, less than or equal to 200 nM, 190 nM, 180 nM, 170 nM, 160 nM, 150 nM, 140 nM, 130 nM, 120 nM, 110 nM, 100 nM, 90 nM, 80 nM, 75 nM, 65 nM, or 50 nM. Probes can be designed to be complementary to the loop region between the F1c and F2 primer binding sites for the LAMP primers, this can be reffed to as the long toehold region. The complementary portion can be between about 9 and 14 nucleotides long, more preferably 11-12 nucleotides long. In an aspect, the longer strand of the OSD is labeled with a fluorescent molecule at the 5′ or 3′ end of the strand. In an aspect, the label is provided on the end opposite the designed complementary target region (long toehold region). The short strand is prepared with a quencher on one end of the probe and can be designed to comprise a region complementary to a portion of the long strand. The OSD probes can be provided as part of LAMP reagents as described herein, which may comprise their use on any of the devices, cartridges or in any of the compositions as provided herein, including being provided as a lyophilized reagent in some instances.

### Extraction Solutions

[0880] In certain aspects, embodiments disclosed herein are directed to compositions and kits that consolidate extraction-free lysis and amplification of target nucleic acids into a single reaction volume. In certain example embodiments, the extraction-free lysis reagents can be used to extract nucleic acids from cells and/or viral particles. In contrast to existing protocols, the extraction-free lysis solution does not require isolation of the nucleic acid prior to further amplification. The extraction-free lysis reagents may be mixed with amplification reagents such as standard RT-PCR amplification reactions.

[0881] In one embodiment, extraction-free lysis solution and isothermal amplification reagents may be lyophilized in a single reaction volume, to be reconstituted by addition of a sample to be assayed. In certain other embodiments, the extraction-free lysis solution and and isothermal amplification reagents may be lyophilized and stored on a cartridge or lateral flow strip, as discussed in further detail below.

[0882] In certain example embodiments, the single lysis reaction compositions and kits may further comprise one or more TnpB proteins possessing collateral activity and a detection construct. Pairing with one or more TnpB proteins may increase sensitivity or specificity of the assay. In certain example embodiments, the one or more TnpB proteins may be thermostable TnpB proteins. Example TnpB proteins are disclosed in further detail below.

[0883] In certain example embodiments, the single lysis amplification reaction compositions and kits may comprise optimized primers and/or one or more additives. In an aspect, the design optimizes the primers used in the amplification, in particular aspects, the isothermal amplification is used alone. In another aspect, the iotheraml amplification is used with TnpB systems. In either approach, design considerations can follow a rational design for optimization of the reactions. In an example, varying additives with specific primers, target, TnpB protein, temperature, and other additive concentrations within the reaction can be identified. Optimization can be made with the goal of reducing the number of steps and buffer exchanges that have to occur in the reaction, simplifying the reaction and reducing the risks of contamination at transfer steps. In an aspect, addition of inhibitors, such as proteinase K can be considered so that buffer exchanges can be reduced. Similarly, optimizing the salt levels as well as the type of salt utilized can further facilitate and optimize the one-pot detections disclosed herein. In an aspect, potassium chloride can be utilized rather than sodium chloride when such amplification approaches are used with bead concentration in a lysis step.

[0884] In one embodiment, the compositions and kits may further comprise nucleic acid binding bead. The bead may be used to capture, concentrate, or otherwise enrich for particular material. The bead may be magnetic and may be provided to capture nucleic acid material. In another aspect, the bead is a silica bead. Beads may be utilized in an extraction step of the methods disclosed herein. Beads can be optionally used with the methods described herein, including with the one-pot methods that allow for concentration of viral nucleic acids from large volume samples, such as saliva or swab samples to allow for a single one-pot reaction method. Concentration of desired target molecules can be increased by about 10-fold, 50-fold, 100-fold, 200-fold, 500-fold, 800-fold, 1000-fold, 1500-fold, 2000-fold, 2500-fold, 3000-fold, or more.

[0885] Magnetic beads in a PEG and salt solution are preferred in an aspect, and in embodiments bind to viral RNA and/or DNA which allows for concentration and lysis concurrently. Silica beads can be used in another aspect. Capture moieties such as oligonucleotide functionalized beads are envisioned for use. The beads may be using with the extraction reagents, allowed to incubate with a sample and the lysis/extraction buffer, thereby concrrating target molecules on the beads. When used with a cartridge device detailed elsewhere herein, a magnet can be activated and the beads collected, with optional flushing of the extraction buffer and one or more washes performed. Advantageously, the beads can be used in the one-pot methods and systems without additional washings of the beads, allowing for a more efficient process without increased risks of contamination in multi-step processes. Beads can be utilized with the isothermal amplifications detailed herein, and the beads can flow into an amplification chamber of the cartridge or be maintained in the pot for the amplification step. Upon heating, nucleic acid can be released off the beads.

### Diagnosti Devices

[0886] The systems described herein can be embodied on diagnostic devices. A number of substrates and configurations may be used. The devices may be capable of defining multiple individual discrete volumes within the device. As used herein an “individual discrete volume” refers to a discrete space, such as a container, receptacle, or other defined volume or space that can be defined by properties that prevent and/or inhibit migration of target molecules, for example a volume or space defined by physical properties such as walls, for example the walls of a well, tube, or a surface of a droplet, which may be impermeable or semipermeable, or as defined by other means such as chemical, diffusion rate limited, electro-magnetic, or light illumination, or any combination thereof that can contain a a sample within a defined space. Individual discrete volumes may be identified by molecular tags, such as nucleic acid barcodes. By “diffusion rate limited” (for example diffusion defined volumes) is meant spaces that are only accessible to certain molecules or reactions because diffusion constraints effectively defining a space or volume as would be the case for two parallel laminar streams where diffusion will limit the migration of a target molecule from one stream to the other. By “chemical” defined volume or space is meant spaces where only certain target molecules can exist because of their chemical or molecular properties, such as size, where for example gel beads may exclude certain species from entering the beads but not others, such as by surface charge, matrix size or other physical property of the bead that can allow selection of species that may enter the interior of the bead. By “electro-magnetically” defined volume or space is meant spaces where the electro-magnetic properties of the target molecules or their supports such as charge or magnetic properties can be used to define certain regions in a space such as capturing magnetic particles within a magnetic field or directly on magnets. By “optically” defined volume is meant any region of space that may be defined by illuminating it with visible, ultraviolet, infrared, or other wavelengths of light such that only target molecules within the defined space or volume may be labeled. One advantage to the use of non-walled, or semipermeable discrete volumes is that some reagents, such as buffers, chemical activators, or other agents may be passed through the discrete volume, while other materials, such as target molecules, may be maintained in the discrete volume or space. Typically, a discrete volume will include a fluid medium, (for example, an aqueous solution, an oil, a buffer, and/or a media capable of supporting cell growth) suitable for labeling of the target molecule with the indexable nucleic acid identifier under conditions that permit labeling. Exemplary discrete volumes or spaces useful in the disclosed methods include droplets (for example, microfluidic droplets and/or emulsion droplets), hydrogel beads or other polymer structures (for example poly-ethylene glycol di-acrylate beads or agarose beads), tissue slides (for example, fixed formalin paraffin embedded tissue slides with particular regions, volumes, or spaces defined by chemical, optical, or physical means), microscope slides with regions defined by depositing reagents in ordered arrays or random patterns, tubes (such as, centrifuge tubes, microcentrifuge tubes, test tubes, cuvettes, conical tubes, and the like), bottles (such as glass bottles, plastic bottles, ceramic bottles, Erlenmeyer flasks, scintillation vials and the like), wells (such as wells in a plate), plates, pipettes, or pipette tips among others. In one embodiment, the compartment is an aqueous droplet in a water-in-oil emulsion. In specific embodiments, any of the applications, methods, or systems described herein requiring exact or uniform volumes may employ the use of an acoustic liquid dispenser.

[0887] In some embodiments, the individual discrete volumes may be droplets.

[0888] In certain example embodiments, the device comprises a flexible material substrate on which a number of spots may be defined. Flexible substrate materials suitable for use in diagnostics and biosensing are known within the art. The flexible substrate materials may be made of plant derived fibers, such as cellulosic fibers, or may be made from flexible polymers such as flexible polyester films and other polymer types. Within each defined spot, reagents of the system described herein are applied to the individual spots. Each spot may contain the same reagents except for a different guide RNA or set of guide RNAs, or where applicable, a different detection aptamer to screen for multiple targets at once. Thus, the systems and devices herein may be able to screen samples from multiple sources (e.g., multiple clinical samples from different individuals) for the presence of the same target, or a limited number of targets, or aliquots of a single sample (or multiple samples from the same source) for the presence of multiple different targets in the sample. In certain example embodiments, the elements of the systems described herein are freeze dried onto the paper or cloth substrate. Example flexible material-based substrates that may be used in certain example devices are disclosed in Pardee et al. Cell. 2016, 165(5):1255-66 and Pardee et al. Cell. 2014, 159(4):950-54. Suitable flexible material-based substrates for use with biological fluids, including blood are disclosed in International Patent Application Publication No. WO/2013/071301 entitled “Paper based diagnostic test” to Shevkoplyas et al. U.S. Patent Application Publication No. 2011/0111517 entitled “Paper-based microfluidic systems” to Siegel et al. and Shafiee et al. “Paper and Flexible Substrates as Materials for Biosensing Platforms to Detect Multiple Biotargets” Scientific Reports 5:8719 (2015). Further flexible based materials, including those suitable for use in wearable diagnostic devices are disclosed in Wang et al. “Flexible Substrate-Based Devices for Point-of-Care Diagnostics” Cell 34(11):909-21 (2016). Further flexible based materials may include nitrocellulose, polycarbonate, methylethyl cellulose, polyvinylidene fluoride (PVDF), polystyrene, or glass (see e.g., US20120238008). In one embodiment, discrete volumes are separated by a hydrophobic surface, such as but not limited to wax, photoresist, or solid ink.

[0889] In some embodiments, a dosimeter or badge may be provided that serves as a sensor or indicator such that the wearer is notified of exposure to certain microbes or other agents. For example, the systems described herein may be used to detect a particular pathogen. Likewise, aptamer-based embodiments disclosed above may be used to detect both polypeptide as well as other agents, such as chemical agents, to which a specific aptamer may bind. Such a device may be useful for surveillance of soldiers or other military personnel, as well as clinicians, researchers, hospital staff, and the like, in order to provide information relating to exposure to potentially dangerous agents as quickly as possible, for example for biological or chemical warfare agent detection. In other embodiments, such a surveillance badge may be used for preventing exposure to dangerous microbes or pathogens in immunocompromised patients, burn patients, patients undergoing chemotherapy, children, or elderly individuals.

[0890] In specific embodiments, each individual discrete volume further comprises one or more detection aptamers comprising a masked RNA polymerase promoter binding site or a masked primer binding site. As such, each individual discrete volume may further comprise nucleic acid amplification reagents.

[0891] In specific embodiments, the target molecule may be a target DNA and the individual discrete volumes further comprise a primer that binds the target DNA and comprises an RNA polymerase promoter.

[0892] Samples sources that may be analyzed using the systems and devices described herein include biological samples of a subject or environmental samples. Environmental samples may include surfaces or fluids. The biological samples may include, but are not limited to, saliva, blood, plasma, sera, stool, urine, sputum, mucous, lymph, synovial fluid, spinal fluid, cerebrospinal fluid, a swab from skin or a mucosal membrane, or combination thereof. In an example embodiment, the environmental sample is taken from a solid surface, such as a surface used in the preparation of food or other sensitive compositions and materials.

[0893] In other example embodiments, the elements of the systems described herein may be place on a single use substrate, such as swab or cloth that is used to swab a surface or sample fluid. For example, the system could be used to test for the presence of a pathogen on a food by swabbing the surface of a food product, such as a fruit or vegetable. Similarly, the single use substrate may be used to swab other surfaces for detection of certain microbes or agents, such as for use in security screening. Single use substrates may also have applications in forensics, where the CRISPR systems are designed to detect, for example identifying DNA SNPs that may be used to identify a suspect, or certain tissue or cell markers to determine the type of biological matter present in a sample. Likewise, the single use substrate could be used to collect a sample from a patient-such as a saliva sample from the mouth- or a swab of the skin. In other embodiments, a sample or swab may be taken of a meat product on order to detect the presence of absence of contaminants on or within the meat product.

[0894] Near-real-time microbial diagnostics are needed for food, clinical, industrial, and other environmental settings (see e.g., Lu T K, Bowers J, and Koeris M S., Trends Biotechnol. 2013 June; 31(6):325-7). In one embodiment, the present invention is used for rapid detection of foodborne pathogens using guide RNAs specific to a pathogen (e.g., Campylobacter jejuni, Clostridium perfringens, Salmonella spp., Escherichia coli, Bacillus cereus, Listeria monocytogenes, Shigella spp., Staphylococcus aureus, Staphylococcal enteritis, Streptococcus, Vibrio cholerae, Vibrio parahaemolyticus, Vibrio vulnificus, Yersinia enterocolitica and Yersinia pseudotuberculosis, Brucella spp., Corynebacterium ulcerans, Coxiella burnetii, or Plesiomonas shigelloides).

[0895] In one embodiment, the device is or comprises a flow strip. For instance, a lateral flow strip allows for detection by color. The reporter is modified to have a first molecule (such as for instance FITC) attached to the 5′ end and a second molecule (such as for instance biotin) attached to the 3′ end (or vice versa). The lateral flow strip is designed to have two capture lines with anti-first molecule (e.g., anti-FITC) antibodies hybridized at the first line and anti-second molecule (e.g., anti-biotin) antibodies at the second downstream line. As the reaction flows down the strip, uncleaved reporter will bind to anti-first molecule antibodies at the first capture line, while cleaved reporters will liberate the second molecule and allow second molecule binding at the second capture line. Second molecule sandwich antibodies, for instance conjugated to nanoparticles, such as gold nanoparticles, will bind any second molecule at the first or second line and result in a strong readout/signal (e.g., color). As more reporter is cleaved, more signal will accumulate at the second capture line and less signal will appear at the first line. In certain aspects, the invention relates to the use of a follow strip as described herein for detecting nucleic acids or polypeptides. In certain aspects, the invention relates to a method for detecting nucleic acids or polypeptides with a flow strip as defined herein, e.g., (lateral) flow tests or (lateral) flow immunochromatographic assays.

[0896] The embodiments disclosed herein are directed to lateral flow detection devices that comprise TnpB systems. The device may comprise a lateral flow substrate for detecting a TnpB collateral reaction. Substrates suitable for use in lateral flow assays are known in the art. These may include, but are not necessarily limited to, membranes or pads made of cellulose and/or glass fiber, polyesters, nitrocellulose, or absorbent pads (J Saudi Chem Soc 19(6):689-705; 2015). The TnpB system, i.e., one or more TnpB systems and corresponding reporter constructs are added to the lateral flow substrate at a defined reagent portion of the lateral flow substrate, typically on one end of the lateral flow substrate. Reporting constructs used within the context of the present invention comprise a first molecule and a second molecule linked by anDNA linker. The lateral flow substrate further comprises a sample portion. The sample portion may be equivalent to, continuous with, or adjact to the reagent portion. The lateral flow strip further comprises a first capture line, typically a horizontal line running across the device, but other configurations are possible. The first capture region is proximate to and on the same end of the lateral flow substrate as the sample loading portion. A first binding agent that specifically binds the first molecule of the reporter construct is fixed or otherwise immobilized to the first capture region. The second capture region is located towards the opposite end of the lateral flow substrate from the first binding region. A second binding agent is fixed or otherwise immobilized at the second capture region. The second binding agent specifically binds the second molecule of the reporter construct, or the second binding agent may bind a detectable ligand. For example, the detectable ligand may be a particle, such as a colloidal particle, that when it aggregates can be detected visually. The particle may be modified with an antibody that specifically binds the second molecule on the reporter construct. If the reporter construct is not cleaved it will facilitate accumulation of the detectable ligand at the first binding region. If the reporter construct is cleaved the detectable ligand is released to flow to the second binding region. In such an embodiment, the second binding agent is an agent capable of specifically or non-specifically binding the detectable ligand on the antibody on the detectable ligand. Examples of suitable binding agents for such an embodiment include, but are not limited to, protein A and protein G.

[0897] Lateral support substrates may be located within a housing (see for example, “Rapid Lateral Flow Test Strips” Merck Millipore 2013). The housing may comprise at least one opening for loading samples and a second single opening or separate openings that allow for reading of detectable signal generated at the first and second capture regions.

[0898] The TnpB system may be freeze-dried to the lateral flow substrate and packaged as a ready to use device, or the TnpB system may be added to the reagent portion of the lateral flow substrate at the time of using the device. Samples to be screened are loaded at the sample loading portion of the lateral flow substrate. The samples must be liquid samples or samples dissolved in an appropriate solvent, usually aqueous. The liquid sample reconstitutes the TnpB reagents such that a TnpB reaction can occur. The liquid sample begins to flow from the sample portion of the substrate towards the first and second capture regions. Intact reporter construct is bound at the first capture region by binding between the first binding agent and the first molecule. Likewise, the detection agent will begin to collect at the first binding region by binding to the second molecule on the intact reporter construct. If target molecule(s) are present in the sample, the TnpB collateral effect is activated. As activated TnpB comes into contact with the bound reporter construct, the reporter constructs are cleaved, releasing the second molecule to flow further down the lateral flow substrate towards the second binding region. The released second molecule is then captured at the second capture region by binding to the second binding agent, where additional detection agent may also accumulate by binding to the second molecule. Accordingly, if the target molecule(s) is not present in the sample, a detectable signal will appear at the first capture region, and if the target molecule(s) is present in the sample, a detectable signal will appear at the location of the second capture region.

[0899] Specific binding-integrating molecules comprise any members of binding pairs that can be used in the present invention. Such binding pairs are known to those skilled in the art and include, but are not limited to, antibody-antigen pairs, enzyme-substrate pairs, receptor-ligand pairs, and streptavidin-biotin. In addition to such known binding pairs, novel binding pairs may be specifically designed. A characteristic of binding pairs is the binding between the two members of the binding pair.

[0900] Oligonucleotide Linkers having molecules on either end may comprise DNA if the TnpB has DNA collateral activity. Oligonucleotide linkers may be single stranded or double stranded, and in one embodiment, they could contain both RNA and DNA regions. Oligonucleotide linkers may be of varying lengths, such as 5-10 nucleotides, 10-20 nucleotides, 20-50 nucleotides, or more.

[0901] In some embodiments, the polypeptide identifier elements include affinity tags, such as hemagglutinin (HA) tags, Myc tags, FLAG tags, V5 tags, chitin binding protein (CBP) tags, maltose-binding protein (MBP) tags, GST tags, poly-His tags, and fluorescent proteins (for example, green fluorescent protein (GFP), yellow fluorescent protein (YFP), cyan fluorescent protein (CFP), dsRed, mCherry, Kaede, Kindling, and derivatives thereof, FLAG tags, Myc tags, AU1 tags, T7 tags, OLLAS tags, Glu-Glu tags, VSV tags, or a combination thereof. Other Affinity tags are well known in the art. Such labels can be detected and/or isolated using methods known in the art (for example, by using specific binding agents, such as antibodies, that recognize a particular affinity tag). Such specific binding agents (for example, antibodies) can further contain, for example, detectable labels, such as isotope labels and/or nucleic acid barcodes such as those described herein.

[0902] In certain example embodiments, a lateral flow device comprises a lateral flow substrate comprising a first end for application of a sample. The first region is loaded with a detectable ligand, such as those disclosed herein, for example a gold nanoparticle. The gold nanoparticle may be modified with a first antibody, such as an anti-FITC antibody. The first region also comprises a detection construct. In one example embodiment, a DNA detection construct and a TnpB system as disclosed herein. In one example embodiment, and for purposes of further illustration, the DNA construct may comprise a FAM molecule on a first end of the detection construction and a biotin on a second end of the detection construct. Upstream of the flow of solution from the first end of the lateral flow substrate is a first test band. The test band may comprise a biotin ligand. Accordingly, when the DNA detection construct is present it its initial state, i.e., in the absence of target, the FAM molecule on the first end will bind the anti-FITC antibody on the gold nanoparticle, and the biotin on the second end of the DNA construct will bind the biotin ligand allowing for the detectable ligand to accumulate at the first test, generating a detectable signal. Generation of a detectable signal at the first band indicate the absence of the target ligand. In the presence of target, the TnpB complex forms and the TnpB is activated resulting in cleavage of the DNA detection construct. In the absence of intact DNA detection construct the colloidal gold will flow past the second strip. The lateral flow device may comprise a second band, upstream of the first band. The second band may comprise a molecule capable of binding the antibody-labeled colloidal gold molecule, for example an anti-rabbit antibody caple of binding a rabbit anti-FTIC antibody on the colloidal gold. Therefore, in the presence of one or more targets, the detectable ligand will accumulate at the second band, indicating the presence of the one or more targets in the sample.

[0903] In certain example embodiments, the device is a microfluidic device that generates and/or merges different droplets (i.e., individual discrete volumes). For example, a first set of droplets may be formed containing samples to be screened and a second set of droplets formed containing the elements of the systems described herein. The first and second set of droplets are then merged, and then diagnostic methods as described herein are carried out on the merged droplet set. Microfluidic devices disclosed herein may be silicone-based chips and may be fabricated using a variety of techniques including, but not limited to, hot embossing, molding of elastomers, injection molding, LIGA, soft lithography, silicon fabrication and related thin film processing techniques. Suitable materials for fabricating the microfluidic devices include, but are not limited to, cyclic olefin copolymer (COC), polycarbonate, poly(dimethylsiloxane) (PDMS), and poly(methylacrylate) (PMMA). In one embodiment, soft lithography in PDMS may be used to prepare the microfluidic devices. For example, a mold may be made using photolithography which defines the location of flow channels, valves, and filters within a substrate. The substrate material is poured into a mold and allowed to set to create a stamp. The stamp is then sealed to a solid support, such as but not limited to, glass. Due to the hydrophobic nature of some polymers, such as PDMS, which absorbs some proteins and may inhibit certain biological processes, a passivating agent may be necessary (Schoffner et al. Nucleic Acids Research, 1996, 24:375-379). Suitable passivating agents are known in the art and include, but are not limited to, silanes, parylene, n-Dodecyl-b-D-matoside (DDM), pluronic, Tween-20, other similar surfactants, polyethylene glycol (PEG), albumin, collagen, and other similar proteins and peptides.

[0904] In certain example embodiments, the system and/or device may be adapted for conversion to a flow-cytometry readout in or allow to all of sensitive and quantitative measurements of millions of cells in a single experiment and improve upon existing flow-based methods, such as the PrimeFlow assay. In certain example embodiments, cells may be cast in droplets containing unpolymerized gel monomer, which can then be cast into single-cell droplets suitable for analysis by flow cytometry. A detection construct comprising a fluorescent detectable label may be cast into the droplet comprising unpolymerized gel monomer. Upon polymerization of the gel monomer to form a bead within a droplet. Because gel polymerization is through free-radical formation, the fluorescent reporter becomes covalently bound to the gel. The detection construct may be further modified to comprise a linker, such as an amine. A quencher may be added post-gel formation and will bind via the linker to the reporter construct. Thus, the quencher is not bound to the gel and is free to diffuse away when the reporter is cleaved by the TnpB. Amplification of signal in droplet may be achieved by coupling the detection construct to a hybridization chain reaction (HCR initiator) amplification. DNA/RNA hybrid hairpins may be incorporated into the gel which may comprise a hairpin loop that has a RNase sensitive domain. By protecting a strand displacement toehold within a hairpin loop that has a RNase sensitive domain, HCR initiators may be selectively deprotected following cleavage of the hairpin loop by the TnpB system. Following deprotection of HCR initiators via toehold mediated strand displacement, fluorescent HCR monomers may be washed into the gel to enable signal amplification where the initiators are deprotected.

[0905] An example of microfluidic device that may be used in the context of the invention is described in Hour et al. “Direct Detection and drug-resistance profiling of bacteremias using inertial microfluidics” Lap Chip. 15(10):2297-2307 (2016).

[0906] In systems described herein, may further be incorporated into wearable medical devices that assess biological samples, such as biological fluids, of a subject outside the clinic setting and report the outcome of the assay remotely to a central server accessible by a medical care professional. The device may include the ability to self-sample blood, such as the devices disclosed in U.S. Patent Application Publication No. 2015/0342509 entitled “Needle-free Blood Draw to Peeters et al., U.S. Patent Application Publication No. 2015/0065821 entitled “Nanoparticle Phoresis” to Andrew Conrad.

[0907] In some embodiments, the individual discrete volumes are microwells.

[0908] In certain example embodiments, the device may comprise individual wells, such as microplate wells. The size of the microplate wells may be the size of standard 6, 24, 96, 384, 1536, 3456, or 9600 sized wells. In certain example embodiments, the elements of the systems described herein may be freeze dried and applied to the surface of the well prior to distribution and use.

[0909] The devices disclosed herein may further comprise inlet and outlet ports, or openings, which in turn may be connected to valves, tubes, channels, chambers, and syringes and/or pumps for the introduction and extraction of fluids into and from the device. The devices may be connected to fluid flow actuators that allow directional movement of fluids within the microfluidic device. Example actuators include, but are not limited to, syringe pumps, mechanically actuated recirculating pumps, electroosmotic pumps, bulbs, bellows, diaphragms, or bubbles intended to force movement of fluids. In certain example embodiments, the devices are connected to controllers with programmable valves that work together to move fluids through the device. In certain example embodiments, the devices are connected to the controllers discussed in further detail below. The devices may be connected to flow actuators, controllers, and sample loading devices by tubing that terminates in metal pins for insertion into inlet ports on the device.

[0910] As shown herein the elements of the system are stable when freeze dried, therefore embodiments that do not require a supporting device are also contemplated, i.e., the system may be applied to any surface or fluid that will support the reactions disclosed herein and allow for detection of a positive detectable signal from that surface or solution. In addition to freeze-drying, the systems may also be stably stored and utilized in a pelletized form. Polymers useful in forming suitable pelletized forms are known in the art.

[0911] In some embodiments, the individual discrete volumes are defined on a solid substrate. In some embodiments, the individual discrete volumes are spots defined on a substrate. In some embodiments, the substrate may be a flexible materials substrate, for example, including, but not limited to, a paper substrate, a fabric substrate, or a flexible polymer-based substrate. In specific embodiments, the flexible materials substrate is a paper substrate or a flexible polymer-based substrate.

[0912] In one embodiment, the TnpB is bound to each discrete volume in the device. Each discrete volume may comprise a different ωRNA specific for a different target molecule. In one embodiment, a sample is exposed to a solid substrate comprising more than one discrete volume each comprising a ωRNA specific for a target molecule. Not being bound by a theory, each ωRNA will capture its target molecule from the sample and the sample does not need to be divided into separate assays. Thus, a valuable sample may be preserved. The effector protein may be a fusion protein comprising an affinity tag. Affinity tags are well known in the art (e.g., HA tag, Myc tag, Flag tag, His tag, biotin). The effector protein may be linked to a biotin molecule and the discrete volumes may comprise streptavidin. In other embodiments, the CRISPR effector protein is bound by an antibody specific for the effector protein. Methods of binding a CRISPR enzyme has been described previously (see, e.g., US20140356867A1).

[0913] The devices disclosed herein may also include elements of point of care (POC) devices known in the art for analyzing samples by other methods. See, for example St John and Price, “Existing and Emerging Technologies for Point-of-Care Testing” (Clin Biochem Rev. 2014 August; 35(3): 155-167).

[0914] The present invention may be used with a wireless lab-on-chip (LOC) diagnostic sensor system (see e.g., U.S. Pat. No. 9,470,699 “Diagnostic radio frequency identification sensors and applications thereof”). In one embodiment, the present invention is performed in a LOC controlled by a wireless device (e.g., a cell phone, a personal digital assistant (PDA), a tablet) and results are reported to said device.

[0915] Radio frequency identification (RFID) tag systems include an RFID tag that transmits data for reception by an RFID reader (also referred to as an interrogator). In a typical RFID system, individual objects (e.g., store merchandise) are equipped with a relatively small tag that contains a transponder. The transponder has a memory chip that is given a unique electronic product code. The RFID reader emits a signal activating the transponder within the tag through the use of a communication protocol. Accordingly, the RFID reader is capable of reading and writing data to the tag. Additionally, the RFID tag reader processes the data according to the RFID tag system application. Currently, there are passive and active type RFID tags. The passive type RFID tag does not contain an internal power source, but is powered by radio frequency signals received from the RFID reader. Alternatively, the active type RFID tag contains an internal power source that enables the active type RFID tag to possess greater transmission ranges and memory capacity. The use of a passive versus an active tag is dependent upon the particular application.

[0916] Lab-on-the chip technology is well described in the scientific literature and consists of multiple microfluidic channels, input or chemical wells. Reactions in wells can be measured using radio frequency identification (RFID) tag technology since conductive leads from RFID electronic chip can be linked directly to each of the test wells. An antenna can be printed or mounted in another layer of the electronic chip or directly on the back of the device. Furthermore, the leads, the antenna and the electronic chip can be embedded into the LOC chip, thereby preventing shorting of the electrodes or electronics. Since LOC allows complex sample separation and analyses, this technology allows LOC tests to be done independently of a complex or expensive reader. Rather a simple wireless device such as a cell phone or a PDA can be used. In one embodiment, the wireless device also controls the separation and control of the microfluidics channels for more complex LOC analyses. In one embodiment, a LED and other electronic measuring or sensing devices are included in the LOC-RFID chip. Not being bound by a theory, this technology is disposable and allows complex tests that require separation and mixing to be performed outside of a laboratory.

[0917] In preferred embodiments, the LOC may be a microfluidic device. The LOC may be a passive chip, wherein the chip is powered and controlled through a wireless device. In one embodiment, the LOC includes a microfluidic channel for holding reagents and a channel for introducing a sample. In one embodiment, a signal from the wireless device delivers power to the LOC and activates mixing of the sample and assay reagents. Specifically, in the case of the present invention, the system may include a masking agent, CRISPR effector protein, and guide RNAs specific for a target molecule. Upon activation of the LOC, the microfluidic device may mix the sample and assay reagents. Upon mixing, a sensor detects a signal and transmits the results to the wireless device. In one embodiment, the unmasking agent is a conductive RNA molecule. The conductive RNA molecule may be attached to the conductive material. Conductive molecules can be conductive nanoparticles, conductive proteins, metal particles that are attached to the protein or latex or other beads that are conductive. In one embodiment, if DNA or RNA is used then the conductive molecules can be attached directly to the matching DNA or RNA strands. The release of the conductive molecules may be detected across a sensor. The assay may be a one step process.

[0918] Since the electrical conductivity of the surface area can be measured precisely quantitative results are possible on the disposable wireless RFID electro-assays. Furthermore, the test area can be very small allowing for more tests to be done in a given area and therefore resulting in cost savings. In one embodiment, separate sensors each associated with a different CRISPR effector protein and guide RNA immobilized to a sensor are used to detect multiple target molecules. Not being bound by a theory, activation of different sensors may be distinguished by the wireless device.

[0919] In addition to the conductive methods described herein, other methods may be used that rely on RFID or Bluetooth as the basic low-cost communication and power platform for a disposable RFID assay. For example, optical means may be used to assess the presence and level of a given target molecule. In one embodiment, an optical sensor detects unmasking of a fluorescent masking agent.

[0920] In one embodiment, the device of the present invention may include handheld portable devices for diagnostic reading of an assay (see e.g., Vashist et al., Commercial Smartphone-Based Devices and Smart Applications for Personalized Healthcare Monitoring and Management, Diagnostics 2014, 4(3), 104-128; mReader from Mobile Assay; and Holomic Rapid Diagnostic Test Reader).

[0921] As noted herein, certain embodiments allow detection via colorimetric change which has certain attendant benefits when embodiments are utilized in POC situations and or in resource poor environments where access to more complex detection equipment to readout the signal may be limited. However, portable embodiments disclosed herein may also be coupled with hand-held spectrophotometers that enable detection of signals outside the visible range. An example of a hand-held spectrophotometer device that may be used in combination with the present invention is described in Das et al. “Ultra-portable, wireless smartphone spectrophotometer for rapid, non-destructive testing of fruit ripeness.” Nature Scientific Reports. 2016, 6:32504, DOI: 10.1038/srep32504. Finally, in one embodiment utilizing quantum dot-based masking constructs, use of a handheld UV light, or other suitable device, may be successfully used to detect a signal owing to the near complete quantum yield provided by quantum dots.

### Methods for Detecting Nucleic Acids

[0922] The low cost and adaptability of the assay platform lends itself to a number of applications including (i) general RNA/DNA quantitation, (ii) rapid, multiplexed RNA/DNA and protein expression detection, and (iii) sensitive detection of target nucleic acids, peptides, and proteins in both clinical and environmental samples. Additionally, the systems disclosed herein may be adapted for detection of transcripts within biological settings, such as cells. Given the highly specific nature of the CRISPR effectors described herein, it may be possible to track allelic specific expression of transcripts or disease-associated mutations in live cells.

[0923] In some embodiments, methods include detecting target nucleic acids in samples, comprising distributing a sample or set of samples into one or more individual discrete volumes comprising a TnpB system as described hereinof. The sample or set of samples may then be incubated under conditions sufficient to allow binding of the one or more ωRNAs to one or more target molecules, and the TnpB protein may be activated via binding of the one or more ωRNA to the one or more target molecules, wherein activating the CRISPR effector protein results in modification of the detection construct such that a detectable positive signal is generated. The one or more detectable positive signals may then be detected, with detection indicating the presence of one or more target molecules in the sample.

[0924] In some embodiments, methods of the invention include detecting polypeptides in samples, comprising distributing a sample or set of samples into a set of individual discrete volumes comprising peptide detection aptamers and a TnpB as described herein. The sample or set of samples may then be incubated under conditions sufficient to allow binding of the peptide detection aptamers to the one or more target molecules, wherein binding of the aptamer to a corresponding target molecule exposes the RNA polymerase binding site or primer binding site resulting in generation of a trigger RNA. The TnpB may then be activated via binding of the one or more ωRNAs to the trigger RNA, wherein activating the TnpB protein results in modification of the detection construct such that a detectable positive signal is produced. The detectable positive signal may then be detected, with detection of the detectable positive signal indicating the presence of one or more target molecules in a sample.

[0925] In certain example embodiments, a single guide sequence specific to a single target is placed in separate volumes. Each volume may then receive a different sample or aliquot of the same sample. In certain example embodiments, multiple ωRNAs each to separate target may be placed in a single well such that multiple targets may be screened in a different well. In order to detect multiple ωRNA in a single volume, in certain example embodiments, multiple TnpB proteins with different specificities may be used.

[0926] In embodiments, different TnpB orthologs with different sequence specificities may be used. Cutting motifs may be used to take advantage of the sequence specificities of different orthologs. The detection construct can comprise a cutting motif preferentially cut by a given TnpB ortholog. A cutting motif sequence can be a particular nucleotide base, a repeat nucleotide base in a homopolymer, or a heteropolymer of bases. The cutting motif can be a dinucleotide sequence, a trinucleotide sequence or more complex motifs comprising 4, 5, 6, 7, 8, 9, or 10 nucleotide motifs. For example, one orthologue may preferentially cut A, while others preferentially cut C, G, U/T. Accordingly, detection constructs completely comprising, or comprised of a substantial portion, of a single nucleotide may be generated, each with a different fluorophore that can be detected at differing wavelengths. In this way up to four different targets may be screened in a single individual discrete volume. In certain other example embodiments, different orthologues with different nucleotide editing preferences may be used such as TnpBs in combination with a Cas13 or Cas12.

[0927] In addition to single base editing preferences, additional detection constructs can be designed based on other motif cutting preferences of TnpB, Cas12, and Cas13 orthologs. For example, Cas13 or Cas12 orthologs may preferentially cut a dinucleotide sequence, a trinucleotide sequence or more complex motifs comprising 4, 5, 6, 7, 8, 9, or 10 nucleotide motifs. As an example, LwaCas13a showed strong preference for a hexanucleotide motif sequences, with CcaCas13b showing strong preference for other hexanucleotide motifs. Thus, the upper bound for multiplex assays using the embodiments disclosed herein is primarily limited by the number of distinguishable detectable labels and the detection channels needed to detect them. In certain example embodiments, 2, 3, 4, 5, 6, 7, 8, 9, 10, 11, 12, 13, 14, 15, 16, 17, 18, 19, 20, 21, 22, 23, 24, 25, 25, 27, 28, 29, or 30 different targets are detected. Example methods for identifying such motifs are further disclosed in the Working Examples below.

[0928] In specific embodiments, the target molecule may be a target DNA and the method may further comprise binding the target DNA with a primer comprising an RNA polymerase site, as described herein.

[0929] In specific embodiments, the one or more ωRNA may be designed to detect a single nucleotide polymorphism in a target RNA or DNA, or a splice variant of an RNA transcript.

[0930] A sample for use with the invention may be a biological or environmental sample, such as a food sample (fresh fruits or vegetables, meats), a beverage sample, a paper surface, a fabric surface, a metal surface, a wood surface, a plastic surface, a soil sample, a freshwater sample, a wastewater sample, a saline water sample, exposure to atmospheric air or other gas sample, or a combination thereof. For example, household/commercial/industrial surfaces made of any materials including, but not limited to, metal, wood, plastic, rubber, or the like, may be swabbed and tested for contaminants. Soil samples may be tested for the presence of pathogenic bacteria or parasites, or other microbes, both for environmental purposes and/or for human, animal, or plant disease testing. Water samples such as freshwater samples, wastewater samples, or saline water samples can be evaluated for cleanliness and safety, and/or potability, to detect the presence of, for example, Cryptosporidium parvum, Giardia lamblia, or other microbial contamination. In further embodiments, a biological sample may be obtained from a source including, but not limited to, a tissue sample, saliva, blood, plasma, sera, stool, urine, sputum, mucous, lymph, synovial fluid, cerebrospinal fluid, ascites, pleural effusion, seroma, pus, bile, aqueous or vitreous humor, transudate, exudate, or swab of skin or a mucosal membrane surface. In some particular embodiments, an environmental sample or biological samples may be crude samples and/or the one or more target molecules may not be purified or amplified from the sample prior to application of the method. Identification of microbes may be useful and/or needed for any number of applications, and thus any type of sample from any source deemed appropriate by one of skill in the art may be used in accordance with the invention.

[0931] In some embodiments, the one or more ωRNAs may be designed to bind to cell free nucleic acids. In some embodiments, the one or more ωRNAs may be designed to detect a single nucleotide polymorphism in a target RNA or DNA, or a splice variant of an RNA transcript. In some embodiments, the one or more guide RNAs are designed to bind to one or more target molecules that are diagnostic for a disease state, as described herein.

[0932] In some embodiments, the disease state may be an infection, an organ disease, a blood disease, an immune system disease, a cancer, a brain and nervous system disease, an endocrine disease, a pregnancy or childbirth-related disease, an inherited disease, or an environmentally-acquired disease.

[0933] In certain example embodiments, the systems, devices, and methods, disclosed herein are directed to detecting the presence of one or more microbial agents in a sample, such as a biological sample obtained from a subject. In certain example embodiments, the microbe may be a bacterium, a fungus, a yeast, a protozoa, a parasite, or a virus. Accordingly, the methods disclosed herein can be adapted for use in other methods (or in combination) with other methods that require quick identification of microbe species, monitoring the presence of microbial proteins (antigens), antibodies, antibody genes, detection of certain phenotypes (e.g., bacterial resistance), monitoring of disease progression and/or outbreak, and antibiotic screening. Because of the rapid and sensitive diagnostic capabilities of the embodiments disclosed here, detection of microbe species type, down to a single nucleotide difference, and the ability to be deployed as a POC device, the embodiments disclosed herein may be used guide therapeutic regimens, such as selection of the appropriate antibiotic or antiviral. The embodiments disclosed herein may also be used to screen environmental samples (air, water, surfaces, food etc.) for the presence of microbial contamination.

[0934] Disclosed is a method to identify microbial species, such as bacterial, viral, fungal, yeast, or parasitic species, or the like. Particular embodiments disclosed herein describe methods and systems that will identify and distinguish microbial species within a single sample, or across multiple samples, allowing for recognition of many different microbes. The present methods allow the detection of pathogens and distinguishing between two or more species of one or more organisms, e.g., bacteria, viruses, yeast, protozoa, and fungi or a combination thereof, in a biological or environmental sample, by detecting the presence of a target nucleic acid sequence in the sample. A positive signal obtained from the sample indicates the presence of the microbe. Multiple microbes can be identified simultaneously using the methods and systems of the invention, by employing the use of more than one effector protein, wherein each effector protein targets a specific microbial target sequence. In this way, a multi-level analysis can be performed for a particular subject in which any number of microbes can be detected at once. In some embodiments, simultaneous detection of multiple microbes may be performed using a set of probes that can identify one or more microbial species.

[0935] Multiplex analysis of samples enables large-scale detection of samples, reducing the time and cost of analyses. However, multiplex analyses are often limited by the availability of a biological sample. In accordance with the invention, however, alternatives to multiplex analysis may be performed such that multiple effector proteins can be added to a single sample and each masking construct may be combined with a separate quencher dye. In this case, positive signals may be obtained from each quencher dye separately for multiple detection in a single sample.

[0936] Disclosed herein are methods for distinguishing between two or more species of one or more organisms in a sample. The methods are also amenable to detecting one or more species of one or more organisms in a sample.

[0937] In some embodiments, the methods provide for detection of disease states that are characterized by the presence or absence of an antibiotic or drug resistance or susceptibility gene or transcript or polypeptide, preferably in a pathogen or a cell.

### Devices for Dectection Assays

[0938] In one embodiment, the detection assay can be provided on a cartridge or chip. In an aspect, the cartridge can comprise one or more ampoules and one or more wells that are communicatively coupled, allowing for the transfer, exchange or movement of reagents and sample with or without the use of beads through the chambers of the cartridge and facilitating detection assays utilizing systems/devices for facilitating the detection assay on the cartridge.

### Cartridge

[0939] The cartridge, also referred to herein as a chip, according to the present invention comprises a series of components of ampoules and chambers that are communicatively coupled with one or more other components on the cartridge. The coupling is typically a fluidic communication, for example, via channels. The cartridge may comprise a membrane that seals one or more of the chambers and/or ampoules. In an aspect, the membrane allows for storage of reagents, buffers and other solid or fluid components which cover and seal the cartridge. The membrane can be configured to be punctured, pierced or otherwise released from sealing or covering one or more components of the cartridge by a means for releasing reagents.

[0940] As noted above, certain embodiments enable the use of nucleic acid binding beads to concentrate target nucleic acid but that do not require elution of the isolated nucleic acid. Thus, in certain example embodiments, the cartridge may further comprise an activatable magnet, such as an electro-magnet. A means for activating the magnet may be located on the device, or the means for supplying the magnet or activating the magnet on the cartridge may be provided by a second device, such as those disclosed in further detail below.

### Ampoules

[0941] The ampoules, also refered to as blisters, allow for storage and release of reagents throughout the cartridge. Ampoules can include liquid or solid reagents, for example, lysis reagents in one ampoule and reaction reagents in another ampoule. The reagents can be as described elsewhere herein and can be adapted for the use in the cartridge. The ampoule may be sealed by a film that allows for the bursting, puncture, or other release of the contents of the ampoules. See, e.g., Becker, H. & Gärtner, C. Microfluidics-enabled diagnostic systems: markets, challenges, and examples. In Microchip Diagnostics: Methods and Protocols (eds Taly, V. et al.) (Springer, New York, 2017); Czurratis et al., doi: 10.1088/0960-1317/25/4/045002. Considerations for ampoules can include as discussed in, for example, Smith, S., et al., Blister pouches for effective reagent storage on microfluidic chips for blood cell counting. Microfluid Nanofluid 20, 163 (2016). DOI:10.1007/s10404-016-1830-2. In an aspect, the seal is a frangible seal formed of a composite-layer film that is assembled to the cartride main body. While referred to herein as an ampoule, the ampoule may comprise a cavity on a chip which comprises a sealed film that is opened by the release means.

### Chambers

[0942] The chambers on the chip may located and sized for fluidic communication via channels or other communication means with ampoules and/or other chambers on the chip.

### Means for Reading the Results of the Assay

[0943] A means for reading the results of the assay can be provided in the system. The means for reading the results of the assay will depend in part on the type of detectable signal generated by the assay. In particular embodiments, the assay generates a detectable fluorescent or color readaout. In these instances, the means for reading the results of the assay will be an optic means, for example a single channel or multi-channel optical means such as a fluorimeter, colorimeter or other spectroscopic sensor.

[0944] A combination of means for reading the results of the assay can be utilized, and may include readings such as turbidity, temperature, magnetic, radio, or electrical properties and or optical properties, including scattering, polarization effects, etc.

[0945] The system may further comprise a user interface for programming the device and/or readout of the results of the assay. The user interface may comprise an LED screen. The system can be further configured for a USB port that can allow for docking of four or more devices.

[0946] In an aspect, the system comprises a means for activating a magnet that is disposed within or on the cartridge.

### Lateral Flow Devices

[0947] In one embodiment, the detection assay can be provided on a lateral flow device, see, e.g., International Publication WO 2019/071051, incorporated herein by reference for exemplary lateral flow devices. The lateral flow device can be adapted to detect one or more coronaviruses and/or other viruses in combination of the coronavirus. The lateral flow device may comprise a flexible substrate, such as a paper substrate or a flexible polymer-based substrate, which can include freeze-dried reagents for detection assays with a visual readout of the assay results. See, WO 2019/071051 at [0145]-[0151] and Example 2, specifically incorporated herein by reference. In an aspect, lyophilized reagents can include preferred excipients that aid in rate of reaction, specificity, or other variable, for example, trehalose, histidine, and/or glycine. In one embodiment, a coronavirus assay can be utilized with isothermal amplification reagents, allowing amplification without complex instrumentation that may be unavailable in the field. Accordingly, the assay can be adapted for field diagnostics, including use of visual readout on a lateral flow device, rapid, sensitive detection and can be deployed for early and direct detection. Colorimetric detection can be utilized and may be particularly suited for field deployable applications, as described in International Application PCT/US2019/015726, published as WO2019/148206. In particular, colorimetric detection can be as described in WO2019/148206 at FIGS. 102, 105, 107-111 and [00306]-[00324], incorporated herein by reference and may be utilized with the TnpB systems.

[0948] In one embodiment, the invention provides a lateral flow device comprising a substrate comprising a first end and a second end. The first end may comprise a sample loading portion, a first region comprising a detectable ligand, two or more TnpB systems, two or more detection constructs, and one or more first capture regions, each comprising a first binding agent. The substrate may also comprise two or more second capture regions between the first region of the first end and the second end, each second capture region comprising a different binding agent. Each of the two or more TnpB systems may comprise a TnpB protein and one or more nucleic acid component molecules, each nucleic acid component molecule sequence configured to bind one or more target molecules.

[0949] The device may comprise a lateral flow substrate for detecting a reaction between a TnpB polypeptide and a target molecule triggering collateral, non-specific cleavage of detection construct. Substrates suitable for use in lateral flow assays are known in the art. These may include, but are not necessarily limited to, membranes or pads made of cellulose and/or glass fiber, polyesters, nitrocellulose, or absorbent pads (J Saudi Chem Soc 19(6):689-705; 2015), and other embodiments further described herein. The detection system, i.e., one or more TnpB systems and corresponding reporter constructs are added to the lateral flow substrate at a defined reagent portion of the lateral flow substrate, typically on one end of the lateral flow substrate. Reporting constructs used within the context of the present invention can comprise a first molecule and a second molecule linked by an RNA or DNA linker. The lateral flow substrate further comprises a sample portion. The sample portion may be equivalent to, continuous with, or adjacent to the reagent portion. In an aspect, the lateral flow substrate can be contained within a further device. In an aspect, the lateral flow substrate can be utilized for visual readout of a detectable signal in one-pot reactions, e.g., wherein steps of extracting, amplifying and detecting are performed in an individual discrete volume.

### Lateral Flow Substrate

[0950] In certain example embodiments, a lateral flow device comprises a lateral flow substrate on which detection can be performed. Substrates suitable for use in lateral flow assays are known in the art. These may include, but are not necessarily limited to, membranes or pads made of cellulose and/or glass fiber, polyesters, nitrocellulose, or absorbent pads (J Saudi Chem Soc 19(6):689-705; 2015).

[0951] Lateral support substrates comprise a first and second end, and one or more capture regions that each comprise binding agents. The first end may comprise a sample loading portion, a first region comprising a detectable ligand, two or more TnpB systems, two or more detection constructs, and one or more first capture regions, each comprising a first binding agent. The substrate may also comprise two or more second capture regions between the first region of the first end and the second end, each second capture region comprising a different binding agent. Each of the two or more TnpB systems may comprise a TnpB protein and one or more nucleic acid component molecules, each nucleic acid component configured to bind one or more target molecules. The lateral flow substrates may be configured to detect a reaction wherein collateral, non-specific cleavage is triggered upon binding and cleavage of a target molecule in the reaction by the TnpB protein.

[0952] Lateral support substrates may be located within a housing (see for example, “Rapid Lateral Flow Test Strips” Merck Millipore 2013). The housing may comprise at least one opening for loading samples and a second single opening or separate openings that allow for reading of detectable signal generated at the first and second capture regions.

[0953] The embodiments disclosed herein can be prepared in freeze-dried format for convenient distribution and point-of-care (POC) applications. Such embodiments are useful in multiple scenarios in human health including, for example, viral detection, bacterial strain typing, sensitive genotyping, and detection of disease-associated cell free DNA. Accordingly, the lateral substrate comprising one or more of the elements of the system, including detectable ligands, TnpB systems, detection constructs and binding agents may be freeze-dried to the lateral flow substrate and packaged as a ready to use device. Alternatively, all or a portion of the elements of the system may be added to the reagent portion of the lateral flow substrate at the time of using the device.

### First End and Second End of the Substrate

[0954] The substrate of the lateral flow device comprises a first and second end. The TnpB system, i.e., one or more TnpB systems and corresponding reporter constructs are added to the lateral flow substrate at a defined reagent portion of the lateral flow substrate, typically on a first end of the lateral flow substrate. Reporting constructs used within the context of the present invention comprise a first molecule and a second molecule linked by an RNA or DNA linker. The lateral flow substrate further comprises a sample portion. The sample portion may be equivalent to, continuous with, or adjacent to the reagent portion.

[0955] In certain example embodiments, the first end comprises a first region. The first region comprises a detectable ligand, two or more TnpB systems, two or more detection constructs, and one or more first capture regions, each comprising a first binding agent.

### Capture Regions

[0956] The lateral flow substrate can comprise one or more capture regions. In embodiments the first end of the lateral flow substrate comprises one or more first capture regions, with two or more second capture regions between the first region of the first end of the substrate and the second end of the substrate. The capture regions may be provided as a capture line, typically a horizontal line running across the device, but other configurations are possible. The first capture region is proximate to and on the same end of the lateral flow substrate as the sample loading portion.

### Binding Agents

[0957] Specific binding-integrating molecules comprise any members of binding pairs that can be used in the present invention. Such binding pairs are known to those skilled in the art and include, but are not limited to, antibody-antigen pairs, enzyme-substrate pairs, receptor-ligand pairs, and streptavidin-biotin. In addition to such known binding pairs, novel binding pairs may be specifically designed. A characteristic of binding pairs is the binding between the two members of the binding pair.

[0958] A first binding agent that specifically binds the first molecule of the reporter construct is fixed or otherwise immobilized to the first capture region. The second capture region is located towards the opposite end of the lateral flow substrate from the first capture region. A second binding agent is fixed or otherwise immobilized at the second capture region. The second binding agent specifically binds the second molecule of the reporter construct, or the second binding agent may bind a detectable ligand. For example, the detectable ligand may be a particle, such as a colloidal particle, that when it aggregates can be detected visually, and generates a detectable positive signal. The particle may be modified with an antibody that specifically binds the second molecule on the reporter construct. If the reporter construct is not cleaved it will facilitate accumulation of the detectable ligand at the first binding region. If the reporter construct is cleaved the detectable ligand is released to flow to the second binding region. In such an embodiment, the second binding region comprises a second binding agent capable of specifically or non-specifically binding the detectable ligand on the antibody of the detectable ligand. Binding agents can be, for example, antibodies, that recognize a particular affinity tag. Such binding agents can further contain, for example, detectable labels, such as isotope labels and/or nucleic acid barcodes. A barcode is a short sequence of nucleotides (for example, DNA, RNA, or combinations thereof) that is used as an identifier. A nucleic acid barcode may have a length of 4-100 nucleotides and be either single or double-stranded. Methods for identifying cells with barcodes are known in the art. Accordingly, nucleic acid component molecules of the TnpB systems described herein may be used to detect the barcode.

### Detectable Ligands

[0959] The first region is loaded with a detectable ligand, such as those disclosed herein, for example a gold nanoparticle. The detectable ligand may be a particle, such as a colloidal particle, that when it aggregates can be detected visually. The particle may be modified with an antibody that specifically binds the second molecule on the reporter construct. If the reporter construct is not cleaved it will facilitate accumulation of the detectable ligand at the first binding region. If the reporter construct is cleaved the detectable ligand is released to flow to the second binding region. In such an embodiment, the second binding agent is an agent capable of specifically or non-specifically binding the detectable ligand on the antibody on the detectable ligand. Examples of suitable binding agents for such an embodiment include, but are not limited to, protein A and protein G. In some examples, the detectable ligand is a gold nanoparticle, which may be modified with a first antibody, such as an anti-FITC antibody.

### Lateral Flow Detection Constructs

[0960] The first region also comprises a detection construct. In one example embodiment, a RNA detection construct and a TnpB system (a TnpB protein and one or more nucleic acid component molecules configured to bind to one or more target sequences) as disclosed herein. In one example embodiment, and for purposes of further illustration, the RNA construct may comprise a FAM molecule on a first end of the detection construction and a biotin on a second end of the detection construct. Upstream of the flow of solution from the first end of the lateral flow substrate is a first test band. The test band may comprise a biotin ligand. Accordingly, when the RNA detection construct is present it its initial state, i.e., in the absence of target, the FAM molecule on the first end will bind the anti-FITC antibody on the gold nanoparticle, and the biotin on the second end of the RNA construct will bind the biotin ligand allowing for the detectable ligand to accumulate at the first test, generating a detectable signal. Generation of a detectable signal at the first band indicates the absence of the target ligand. In the presence of target, the TnpB complex forms and the TnpB protein is activated resulting in cleavage of the detection construct. In the absence of intact RNA detection construct the colloidal gold will flow past the second strip. The lateral flow device may comprise a second band, upstream of the first band. The second band may comprise a molecule capable of binding the antibody-labeled colloidal gold molecule, for example an anti-rabbit antibody capable of binding a rabbit anti-FITC antibody on the colloidal gold. Therefore, in the presence of one or more targets, the detectable ligand will accumulate at the second band, indicating the presence of the one or more targets in the sample.

[0961] In one embodiment, the first end of the lateral flow device comprises two detection constructs and each of the two detection constructs comprises an RNA or DNA oligonucleotide, comprising a first molecule on a first end and a second molecule on a second end. The first molecule and the second molecule may be linked by an RNA or DNA linker.

[0962] In one embodiment, the first molecule on the first end of the first detection construct may be FAM and the second molecule on the second end of the first detection construct may be biotin, or vice versa. In one embodiment, the first molecule on the first end of the second detection construct may be FAM and the second molecule on the second end of the second detection construct may be Digoxigenin (DIG), or vice versa.

[0963] In one embodiment, the first end may comprise three detection constructs, wherein each of the three detection constructs comprises an RNA or DNA oligonucleotide, comprising a first molecule on a first end and a second molecule on a second end. In specific embodiments, the first and second molecules on the detection constructs comprise Tye 665 and Alexa 488; Tye 665 and FAM, and Tye 665 and Digoxigenin (DIG), respectively.

[0964] In one embodiment, the first end of the lateral flow device comprises two or more TnpB systems, also referred to as a TnpB system. In one embodiment, such a TnpB system may include a TnpB protein and one or more nucleic acid component molecules configured to bind to one or more target sequences.

### Samples

[0965] When utilizing the detection systems with a lateral flow substrate, samples to be screened are loaded at the sample loading portion of the lateral flow substrate. The samples must be liquid samples or samples dissolved in an appropriate solvent, usually aqueous. The liquid sample reconstitutes the detection reagents such that a detection reaction can occur. The liquid sample begins to flow from the sample portion of the substrate towards the first and second capture regions.

[0966] A sample for use with the invention may be a biological or environmental sample, such as a surface sample, a fluid sample, or a food sample (fresh fruits or vegetables, meats). Food samples may include a beverage sample, a paper surface, a fabric surface, a metal surface, a wood surface, a plastic surface, a soil sample, a freshwater sample, a wastewater sample, a saline water sample, exposure to atmospheric air or other gas sample, or a combination thereof. For example, household/commercial/industrial surfaces made of any materials including, but not limited to, metal, wood, plastic, rubber, or the like, may be swabbed and tested for contaminants. Soil samples may be tested for the presence of pathogenic bacteria or parasites, or other microbes, both for environmental purposes and/or for human, animal, or plant disease testing. Water samples such as freshwater samples, wastewater samples, or saline water samples can be evaluated for cleanliness and safety, and/or potability, to detect the presence of, for example, Cryptosporidium parvum, Giardia lamblia, or other microbial contamination. In further embodiments, a biological sample may be obtained from a source including, but not limited to, a tissue sample, saliva, blood, plasma, sera, stool, urine, sputum, mucous, lymph, synovial fluid, spinal fluid, cerebrospinal fluid, ascites, pleural effusion, seroma, pus, bile, aqueous or vitreous humor, transudate, exudate, or swab of skin or a mucosal membrane surface. In some particular embodiments, an environmental sample or biological samples may be crude samples and/or the one or more target molecules may not be purified or amplified from the sample prior to application of the method. Identification of microbes may be useful and/or needed for any number of applications, and thus any type of sample from any source deemed appropriate by one of skill in the art may be used in accordance with the invention.

[0967] In particular embodiments, the methods and systems can be utilized for direct detection from patient samples. In an aspect, the methods and systems can further allow for direct detection from patient samples with a visual readout to further facilitate field-deployability. In an aspect, a field depoloyable version can include, for example the lateral flow devices and systems as described herein, and/or colorimetric detection. The methods and systems can be utilized to distinguish multipe viral species and strains and identify clinically relevant mutations, important with viral outbreaks such as the coronavirus outbreak in Wuhan (2019-nCoV). In an aspect, the sample is from a nasophyringeal swab or a saliva sample. See., e.g., Wyllie et al., “Saliva is more sensitive for SARS-CoV-2 detection in COVID-19 patients than nasopharyngeal swabs,” DOI: 10.1101/2020.04.16.20067835.

Methods for Detecting and/or Quantifying Target Nucleic Acids

[0968] In one embodiment, the invention provides methods for detecting target nucleic acids in a sample. Such methods may comprise contacting a sample with the first end of a lateral flow device as described herein. The first end of the lateral flow device may comprise a sample loading portion, wherein the sample flows from the sample loading portion of the substrate towards the first and second capture regions and generates a detectable signal.

[0969] A positive detectable signal may be any signal that can be detected using optical, fluorescent, chemiluminescent, electrochemical, or other detection methods known in the art, as described elsewhere herein.

[0970] In one embodiment, the lateral flow device may be capable of detecting two different target nucleic acid sequences. In one embodiment, this detection of two different target nucleic acid sequences may occur simultaneously.

[0971] In one embodiment, the absence of target nucleic acid sequences in a sample elicits a detectable fluorescent signal at each capture region. In such instances, the absence of any target nucleic acid sequences in a sample may cause a detectable signal to appear at the first and second capture regions.

[0972] In one embodiment, the lateral flow device as described herein is capable of detecting three different target nucleic acid sequences. In specific embodiments, when the target nucleic acid sequences are absent from the sample, a fluorescent signal may be generated at each of the three capture regions. In such exemplary embodiments, a fluorescent signal may be absent at the capture region for the corresponding target nucleic acid sequence when the sample contains one or more target nucleic acid sequences.

[0973] Samples to be screened are loaded at the sample loading portion of the lateral flow substrate. The samples must be liquid samples or samples dissolved in an appropriate solvent, usually aqueous. The liquid sample reconstitutes the system reagents such that a detection reaction can occur. Intact reporter construct is bound at the first capture region by binding between the first binding agent and the first molecule. Likewise, the detection agent will begin to collect at the first binding region by binding to the second molecule on the intact reporter construct. If target molecule(s) are present in the sample, the TnpB protein collateral effect is activated. As activated TnpB protein comes into contact with the bound reporter construct, the reporter constructs are cleaved, releasing the second molecule to flow further down the lateral flow substrate towards the second binding region. The released second molecule is then captured at the second capture region by binding to the second binding agent, where additional detection agent may also accumulate by binding to the second molecule. Accordingly, if the target molecule(s) is not present in the sample, a detectable signal will appear at the first capture region, and if the target molecule(s) is present in the sample, a detectable signal will appear at the location of the second capture region.

[0974] In one embodiment, the invention provides a method for quantifying target nucleic acids in samples comprising distributing a sample or set of samples into one or more individual discrete volumes comprising two or more TnpB systems as described herein. The method may comprise using HDA to amplify one or more target molecules in the sample or set of samples, as described herein. The method may further comprise incubating the sample or set of samples under conditions sufficient to allow binding of the nucleic acid component molecules to one or more target molecules. The method may further comprise activating the TnpB protein via binding of the nucleic acid component molecules to the one or more target molecules. Activating the TnpB protein may result in modification of the detection construct such that a detectable positive signal is generated. The method may further comprise detecting the one or more detectable positive signals, wherein detection indicates the presence of one or more target molecules in the sample. The method may further comprise comparing the intensity of the one or more signals to a control to quantify the nucleic acid in the sample. The steps of amplifying, incubating, activating, and detecting may all be performed in the same individual discrete volume.

[0975] An “individual discrete volume” is a discrete volume or discrete space, such as a container, receptacle, or other defined volume or space that can be defined by properties that prevent and/or inhibit migration of nucleic acids and reagents necessary to carry out the methods disclosed herein, for example a volume or space defined by physical properties such as walls, for example the walls of a well, tube, or a surface of a droplet, which may be impermeable or semipermeable, or as defined by other means such as chemical, diffusion rate limited, electro-magnetic, or light illumination, or any combination thereof. By “diffusion rate limited” (for example diffusion defined volumes) is meant spaces that are only accessible to certain molecules or reactions because diffusion constraints effectively defining a space or volume as would be the case for two parallel laminar streams where diffusion will limit the migration of a target molecule from one stream to the other. By “chemical” defined volume or space is meant spaces where only certain target molecules can exist because of their chemical or molecular properties, such as size, where for example gel beads may exclude certain species from entering the beads but not others, such as by surface charge, matrix size or other physical property of the bead that can allow selection of species that may enter the interior of the bead. By “electro-magnetically” defined volume or space is meant spaces where the electro-magnetic properties of the target molecules or their supports, such as charge or magnetic properties, can be used to define certain regions in a space such as capturing magnetic particles within a magnetic field or directly on magnets. By “optically” defined volume is meant any region of space that may be defined by illuminating it with visible, ultraviolet, infrared, or other wavelengths of light such that only target molecules within the defined space or volume may be labeled. One advantage to the used of non-walled, or semipermeable is that some reagents, such as buffers, chemical activators, or other agents maybe passed in Applicants' through the discrete volume, while other material, such as target molecules, maybe maintained in the discrete volume or space. Typically, a discrete volume will include a fluid medium, (for example, an aqueous solution, an oil, a buffer, and/or a media capable of supporting cell growth) suitable for labeling of the target molecule with the indexable nucleic acid identifier under conditions that permit labeling. Exemplary discrete volumes or spaces useful in the disclosed methods include droplets (for example, microfluidic droplets and/or emulsion droplets), hydrogel beads or other polymer structures (for example poly-ethylene glycol di-acrylate beads or agarose beads), tissue slides (for example, fixed formalin paraffin embedded tissue slides with particular regions, volumes, or spaces defined by chemical, optical, or physical means), microscope slides with regions defined by depositing reagents in ordered arrays or random patterns, tubes (such as, centrifuge tubes, microcentrifuge tubes, test tubes, cuvettes, conical tubes, and the like), bottles (such as glass bottles, plastic bottles, ceramic bottles, Erlenmeyer flasks, scintillation vials and the like), wells (such as wells in a plate), plates, pipettes, or pipette tips among others. In certain example embodiments, the individual discrete volumes are the wells of a microplate. In certain example embodiments, the microplate is a 96 well, a 384 well, or a 1536 well microplate.

[0976] Incubating the sample at either the amplification step or the extraction steps as described herein can be performed using heat sources known in the art. Advantageously, the heat source can be readily commercially available heating sources that do not require complicated instrumentation. Exemplary heating systems can include heating blocks, incubators, and/or water baths with temperatures maintained by commercially available sous-vide cookers. In this way, sample diagnostics can be performed without the requirement of expensive and proprietary equipment found primarily in diagnostic laboratory and hospital settings.

[0977] In certain example embodiments, paper-based microfluidics may be used for transfer of samples or reagents. For example, paper strips having wax barrier printed at a defined distance from the end of a paper dipstick may be used to define a volume of reagent or sample to be transferred. For example, a wax barrier may be printed across a paper dipstick to define a microliter volume such that when the dipstick is transferred into a volume of a reagent or sample only a microliter of said reagent or sample is absorbed onto the dipstick. The dipstick may be place in a second reagent mix, where the reagent or sample will diffuse into the reaction mixture. Such components allow for preparation and use of the assay without specialized equipment such as pipettors.

[0978] Optical means may be used to assess the presence and level of a given target molecule. In one embodiment, an optical sensor detects unmasking of a fluorescent masking agent. In one embodiment, the device of the present invention may include handheld portable devices for diagnostic reading of an assay (see e.g., Vashist et al., Commercial Smartphone-Based Devices and Smart Applications for Personalized Healthcare Monitoring and Management, Diagnostics 2014, 4(3), 104-128; mReader from Mobile Assay; and Holomic Rapid Diagnostic Test Reader).

[0979] As noted herein, certain embodiments allow detection via colorimetric change which has certain attendant benefits when embodiments are utilized in POC situations and or in resource poor environments where access to more complex detection equipment to readout the signal may be limited. However, portable embodiments disclosed herein may also be coupled with hand-held spectrophotometers that enable detection of signals outside the visible range. An example of a hand-held spectrophotometer device that may be used in combination with the present invention is described in Das et al. “Ultra-portable, wireless smartphone spectrophotometer for rapid, non-destructive testing of fruit ripeness.” Nature Scientific Reports. 2016, 6:32504, DOI: 10.1038/srep32504. Finally, in one embodiment utilizing quantum dot-based masking constructs, use of a hand-held UV light, or other suitable device, may be successfully used to detect a signal owing to the near complete quantum yield provided by quantum dots.

### Amplifying Target Molecules

[0980] The step of amplifying one or more target molecules can comprise amplification systems known in the art. In one embodiment, amplification is isothermal. In certain example embodiments, target RNAs and/or DNAs may be amplified prior to activating the TnpB protein. Any suitable RNA or DNA amplification technique may be used. In certain embodiments, the amplifying step may take less than about 1 hour, 50 minutes, 40 minutes, 30 minutes, 25 minutes, 20 minutes, or 15 minutes, which may depend on the sample, starting concentrations and nature of amplification used.

[0981] In one embodiment, the amplifying of the target molecules and the detection of the target molecules can be performed in a single reaction, for example, a ‘one-pot’ method. General guidance for use of a single-pot approach can be as described in Gootenberg, et al., Science 2018 Apr. 27: 360(6387) 439-444 (using Cas13, Cas12a and Csm6 generally, detecting multiple targets in a single reaction, and specifically performing DNA extraction in a sample and using as input for direct detection at Figure S33); and Ding et al., “All-in-One Dual CRISPR-Cas12a (AIOD-CRISPR) Assay: A Case for Rapid, Ultrasensitive and Visual Detection of Novel Coronavirus SARS-CoV-2 and HIV Virus,” doi:10.1101/2020.03.19.998724, biorxiv preprint (utilizing a pair of crRNAs with dual CRISPR-Cas12a detection for a one-pot approach to target-specific nucleic acid detection).

[0982] In certain example embodiments, the RNA or DNA amplification is an isothermal amplification. In certain example embodiments, the isothermal amplification may be nucleic-acid sequenced-based amplification (NASBA), recombinase polymerase amplification (RPA), loop-mediated isothermal amplification (LAMP), strand displacement amplification (SDA), helicase-dependent amplification (HDA), or nicking enzyme amplification reaction (NEAR). In certain example embodiments, non-isothermal amplification methods may be used which include, but are not limited to, PCR, multiple displacement amplification (MDA), rolling circle amplification (RCA), ligase chain reaction (LCR), or ramification amplification method (RAM).

[0983] The amplifying of target molecules can be optimized by methods as detailed herein. In an aspect, the design optimizes the primers used in the amplification. In particular aspects, the isothermal amplification is used with TnpB systems. In either approach, design considerations can follow a rational design for optimization of the reactions. Optimization of the methods as disclosed herein can include first screening primers to identify one or more sets of primers that work well for a particular target, TnpB protein and/or reaction. Once the primers have been screened, titration of magnesium concentration can be performed to identify an optimal magnesium concentration for higher signal to noise readout. In an example, varying additives with specific primers, target, TnpB protein, temperature, and other additive concentrations within the reaction can be identified. Optimization can be made with the goal of reducing the number of steps and buffer exchanges that have to occur in the reaction, simplifying the reaction and reducing the risks of contamination at transfer steps. Similarly, optimizing the salt levels as well as the type of salt utilized can further facilitate and optimize the one-pot detections disclosed herein.

### Loop-Mediated Isothermal Amplification

[0984] In certain example embodiments, a loop-mediated isothermal amplification (LAMP) reaction may be used to target nucleic acids, which encompasses both LAMP and RT-LAMP reactions. LAMP can be performed with a four-primer system for isothermal nucleic acid amplification in conjunction with a polymerase. Notomi et al., Nucleic Acids Res. 2000, 28, 12, Nagamine et al., Molecular and Cellular Probes (2002) 16, 223-229, doi: 10.1006/mcpr.2002.0415. When performing LAMP with a 4-primer system, two loop-forming inner primers, denoted as FIP and BIP, are provided with two outer primers, F3 and B3. The inner primers each contain two distinct sequences, one for priming in the first stage of the amplification and the other sequence for self-priming in subsequent amplification states. The two outer primers initiate strand displacement of nucleic acid strands initiated from the FIP and BIP primers, thereby generating formation of loops and strand displacement nucleic acid synthesis utilizing the provided polymerase. LAMP can be conducted with two to six primers, ranging from only the two loop-forming primers, up to at least the addition of 2 additional primers, LF and LB along with the two outer primers and two inner primers. LAMP technologies advantageously have high specificity and can work at a variety of pH and temperature. In a preferred aspect, the LAMP is an isothermal reaction at between about 45° C. to 75° C., 55 to 70° C. or 60° C. to 65° C. Colorimetric LAMP (Y. Zhang et al., doi:10.1101/2020.92.26.20028373), RT-LAMP (Lamb et al., doi: 10.1101/2020.02.19.20025155; and Yang et al., doi:10.1101/2020.03.02.20030130) have been developed for detection of COVID-19, and are incorporated herein by reference in their entirety.

[0985] In one embodiment, the LAMP reagents may include Bst 2.0+RTx or Bst 3.0 from New England Biolabs. In one embodiment, the LAMP reagents may comprise colorimetric or fluorescent detection. Detection of LAMP products can be accomplished using colorimetric tools, such as hydroxy napthol blue (see, e.g., Goto, M., et al., Colorimetric detection of loop-mediated isothermal amplification reaction by using hydroxy naphthol blue. Biotechniques, 2009. 46(3): p. 167-72.) leuco triphenylmethane dyes (see, e.g., Miyamoto, S., et al., Method for colorimetric detection of double-stranded nucleic acid using leuco triphenylmethane dyes. Anal Biochem, 2015. 473: p. 28-33) and pH-sensitive dyes (see, e.g., Tanner, N. A., Y. Zhang, and T. C. Evans, Jr., Visual detection of isothermal nucleic acid amplification using pH-sensitive dyes. Biotechniques, 2015. 58(2): p. 59-68); as well as fluorescent detection (see, e.g., Yu et al., Clinical Chemistry, hvaa102, doi:10.1093/clinchem/hvaa102 12 May 2020), including use of quenching probes (see, e.g., Shirato et al., J Virol Methods. 2018 August; 258:41-48. doi: 10.1016/j.jviromet.2018.05.006).

[0986] In an aspect, the primer sets for LAMP are designed to amplify one or more target sequences, generating amplicons that comprise the one or more target sequences. Optionally, the primers can comprise barcodes that can be designed as described elsewhere herein. Incubating to a temperature sufficient for LAMP amplification e.g., 50° C. to 72° C., more preferably 55° C. to 65° C., using a polymerase and, optionally a reverse transcriptase (in the event RT-LAMP is utilized). Preferably the enzymes utilized in the LAMP reaction are heat-stabilized. LAMP primer sites have been designed, see, e.g., Park et al., “Development of Reverse Transcription Loop-Mediated Isothermal Amplification Assays Targeting SARS-CoV-2” J. of Mol. Diag. (2020). Optionally, a control template is further provided with the sample, which may differ from the target sequence but share primer binding sites. In an exemplary embodiment, visual read out of the detection results can be accomplished using commercially-available lateral flow substrate, e.g., a commercially available paper substrate.

### NASBA

[0987] In certain example embodiments, the RNA or DNA amplification is NASBA, which is initiated with reverse transcription of target RNA by a sequence-specific reverse primer to create an RNA/DNA duplex. RNase H is then used to degrade the RNA template, allowing a forward primer containing a promoter, such as the T7 promoter, to bind and initiate elongation of the complementary strand, generating a double-stranded DNA product. The RNA polymerase promoter-mediated transcription of the DNA template then creates copies of the target RNA sequence. Importantly, each of the new target RNAs can be detected by the nucleic acid component molecules thus further enhancing the sensitivity of the assay. Binding of the target RNAs by the nucleic acid component molecules then leads to activation of the TnpB protein and the methods proceed as outlined above. The NASBA reaction has the additional advantage of being able to proceed under moderate isothermal conditions, for example at approximately 41° C., making it suitable for systems and devices deployed for early and direct detection in the field and far from clinical laboratories.

### RPA

[0988] In certain other example embodiments, a recombinase polymerase amplification (RPA) reaction may be used to amplify the target nucleic acids. RPA reactions employ recombinases which are capable of pairing sequence-specific primers with homologous sequence in duplex DNA. If target DNA is present, DNA amplification is initiated and no other sample manipulation such as thermal cycling or chemical melting is required. The entire RPA amplification system is stable as a dried formulation and can be transported safely without refrigeration. RPA reactions may also be carried out at isothermal temperatures with an optimum reaction temperature of 37-42° C. The sequence specific primers are designed to amplify a sequence comprising the target nucleic acid sequence to be detected. In certain example embodiments, an RNA polymerase promoter, such as a T7 promoter, is added to one of the primers. This results in an amplified double-stranded DNA product comprising the target sequence and an RNA polymerase promoter. After, or during, the RPA reaction, an RNA polymerase is added that will produce RNA from the double-stranded DNA templates. The amplified target RNA can then in turn be detected by the TnpB system. In this way target DNA can be detected using the embodiments disclosed herein. RPA reactions can also be used to amplify target RNA. The target RNA is first converted to cDNA using a reverse transcriptase, followed by second strand DNA synthesis, at which point the RPA reaction proceeds as outlined above.

### Transposase Based Amplification

[0989] Embodiments disclosed herein provide systems and methods for isothermal amplification of target nucleic acid sequences by contacting oligonucleotides containing the target nucleic acid sequence with a transposon complex. The oligonucleotides may be single stranded or double stranded RNA, DNA, or RNA/DNA hybrid oligonucleotides. The transposon complex comprises a transposase and a transposon sequence comprising one or more RNA polymerase promoters. The transposase facilitates insertion of the one or more RNA polymerase promoters into the oligonucleotide. An RNA polymerase promoter can then transcribe the target nucleic acid sequence from the inserted one or more RNA polymerase promoters. One advantage of this system is that there is no need to heat or melt double-stranded DNA templates, since RNA polymerase polymerases require a double-stranded template. Such isothermal amplification is fast and simple, obviating the need for complicated and expensive instrumentation for denaturation and cooling. In certain example embodiment the RNA polymerase promoter is a native of modified T7 RNA promoter.

[0990] The term “transposon”, as used herein, refers to a nucleic acid segment, which is recognized by a transposase or an integrase enzyme and which is an essential component of a functional nucleic acid-protein complex (i.e. a transposome) capable of transposition. The term “transposase” as used herein refers to an enzyme, which is a component of a functional nucleic acid-protein complex capable of transposition and which is mediating transposition. The term “transposase” also refers to integrases from retrotransposons or of retroviral origin. Transposon complexes form between a transposase enzyme and a fragment of double stranded DNA that contains a specific binding sequence for the enzyme, termed “transposon end”. The sequence of the transposon binding site can be modified with other bases, at certain positions, without affecting the ability for transposon complex to form a stable structure that can efficiently transpose into target DNA.

[0991] In embodiments provided herein, the transposon complex may comprise a transposase and a transposon sequence comprising one or more RNA polymerase promoters. The term “promoter” refers to a region of DNA involved in binding the RNA polymerase to initiate transcription. In specific embodiments, the RNA polymerase promoter may be a T7 RNA polymerase promoter. The T7 RNA promoter may be inserted into the double-stranded polynucleotide using the transposase. In one embodiment, insertion of the T7 RNA polymerase promoter into the oligonucleotide may be random.

[0992] The frequency of transposition is very low for most transposons, which use complex mechanisms to limit activity. Tn5 transposase, for example, utilizes a DNA binding sequence that is suboptimal, and the C-terminus of the transposase interferes with DNA binding. Mechanisms involved in Tn5 transposition have been carefully characterized by Reznikoff and colleagues. Tn5 transposes by a cut-and-paste mechanism. The transposon has two pairs of 19 bp elements that are utilized by the transposase: outside elements (OE) and inside elements (IE). One transposase monomer binds to each of the two elements that are utilized. After a monomer is bound to each end of the transposon, the two monomers dimerize, forming a synapse. Vectors with donor backbones of at least 200 bp, but less than 1000 bp, are most functional for transposition in bacteria. Transposon cleavage occurs by trans catalysis and only when monomers bound to each DNA end are in a synaptic complex. Tn5 transposes with a relaxed target site selection and can therefore insert into target DNA with little to no target sequence specificity.

[0993] The natural downregulation of Tn5 transposition can be overcome by selection of a hyperactive transposase and by optimizing the transposase-binding elements [Yorket al. 1998]. A mosaic element (ME), made by modification of three bases of the wildtype OE, led to a 50-fold increase in transposition events in bacteria as well as cell-free systems. The combined effect of the optimized ME and hyperactive mutant transposase is estimated to result in a 100-fold increase in transposition activity. Goryshin et al showed that preformed Tn5 transposition complexes could be functionally introduced into bacterial or yeast by electroporation [Goryshin et al. 2000]. Linearization of the DNA, to have inverted repeats precisely positioned at both ends of the transposon, allowed Goryshin and coworkers to bypass the cutting step of transposition thus enhancing transposition efficiency.

[0994] In one embodiment, the transposase may be used to tagment the oligonucleotide sequence comprising the target sequence. The term “tagmentation” refers to a step in the Assay for Transposase Accessible Chromatin using sequencing (ATAC-seq) as described. (See, Buenrostro, J. D., Giresi, P. G., Zaba, L. C., Chang, H. Y., Greenleaf, W. J., Transposition of native chromatin for fast and sensitive epigenomic profiling of open chromatin, DNA-binding proteins and nucleosome position. Nature methods 2013; 10 (12): 1213-1218). Specifically, a hyperactive Tn5 transposase loaded in vitro with adapters for high-throughput DNA sequencing, can simultaneously fragment and tag a genome with sequencing adapters. In one embodiment the adapters are compatible with the methods described herein.

[0995] In one embodiment, the transposase may be a Tn5 transposase. In one embodiment, the transposase may be a variant of a Tn5 transposase, or an engineered transposase. Transposases may be engineered using any method known in the art. The engineered transposase may be optimized to function at a temperature ranging from 30° C. to 45° C., 35° C. to 40° C. or any temperature in between. The engineered transposase may be optimized to release from the oligonucleotide at a faster rate compared to a wildtype transposase.

[0996] In one embodiment, the transposase may be a Tn5 transposase, a Mu transposase, or a Tn7 transposase. Transposition efficiency in vitro may vary depending on the transposon system used. Generally, Tn5 and Mu transposases effect higher levels of transposition efficiency. In one embodiment, insertion may be random. In one embodiment, insertion may occur in GC rich regions of the target sequence.

[0997] In one embodiment, the transposon sequence may comprise two 19 base pair Mosaic End (ME) Tn5 transposase recognition sequences. Tn5 transposases will generally transpose any DNA sequence contained between such short 19 base pair ME Tn5 transposase recognition sequences.

[0998] In one embodiment, use of a transposase allows for separation of a double-stranded polynucleotide in the absence of heat or melting. Approaches can be adapted from those described in PCT/US2019/039195, incorporated herein by reference.

### Nickase Dependent Amplification

[0999] In an embodiment of the invention may comprise nickase-based amplification. The nicking enzyme may be a TnpB protein. Accordingly, the introduction of nicks into dsDNA can be programmable and sequence-specific. In an embodiment of the invention, two guides can be designed to target opposite strands of a dsDNA target. According to the invention, the nickase can be TnpB, or one may use any CRISPR protein such as Cpf1, C2cl, Cas9, or any ortholog or CRISPR protein that cleaves or is engineered to cleave a single strand of a DNA duplex. In a particular embodiment, the TnpB is utilized in the nickase dependent amplification. The nicked strands may then be extended by a polymerase. In an embodiment, the locations of the nicks are selected such that extension of the strands by a polymerase is towards the central portion of the target duplex DNA between the nick sites. In one embodiment, primers are included in the reaction capable of hybridizing to the extended strands followed by further polymerase extension of the primers to regenerate two dsDNA pieces: a first dsDNA that includes the first strand TnpB guide site or both the first and second strand TnpB guide sites, and a second dsDNA that includes the second strand TnpB guide site or both the first and second strand TnpB guide sites. These pieces continue to be nicked and extended in a cyclic reaction that exponentially amplifies the region of the target between nicking sites. Alternatively, a CRISPR-Cas protein instead of TnpB can be used for nickase-based amplification, and such methods are known in the art.

[1000] The amplification can be isothermal and selected for temperature. In one embodiment, the amplification proceeds rapidly at 37 degrees. In other embodiments, the temperature of the isothermal amplification may be chosen by selecting a polymerase (e.g., Bsu, Bst, Phi29, klenow fragment etc.) operable at a different temperature.

[1001] Thus, whereas nicking isothermal amplification techniques use nicking enzymes with fixed sequence preference (e.g., in nicking enzyme amplification reaction or NEAR), which requires denaturing of the original dsDNA target to allow annealing and extension of primers that add the nicking substrate to the ends of the target, use of a reprogrammable nickase wherein the nicking sites can be programed via RNA molecules means that no denaturing step is necessary, enabling the entire reaction to be truly isothermal. This also simplifies the reaction because these primers that add the nicking substrate are different than the primers that are used later in the reaction, meaning that NEAR requires two primer sets (i.e., 4 primers) while Cpf1 nicking amplification only requires one primer set (i.e. two primers). This makes nicking Cpf1 amplification much simpler and easier to operate without complicated instrumentation to perform the denaturation and then cooling to the isothermal temperature.

[1002] In an aspect, the isothermal amplification reagents may be utilized with a thermostable TnpB protein. The combination of thermostable protein and isothermal amplification reagents may be utilized to further improve reaction times for detection and diagnostics.

[1003] Accordingly, in certain example embodiments the systems disclosed herein may include amplification reagents. Different components or reagents useful for amplification of nucleic acids are described herein. For example, an amplification reagent as described herein may include a buffer, such as a Tris buffer. A Tris buffer may be used at any concentration appropriate for the desired application or use, for example including, but not limited to, a concentration of 1 mM, 2 mM, 3 mM, 4 mM, 5 mM, 6 mM, 7 mM, 8 mM, 9 mM, 10 mM, 11 mM, 12 mM, 13 mM, 14 mM, 15 mM, 25 mM, 50 mM, 75 mM, 1 M, or the like. One of skill in the art will be able to determine an appropriate concentration of a buffer such as Tris for use with the present invention.

[1004] A salt, such as magnesium chloride (MgCl2), potassium chloride (KCl), or sodium chloride (NaCl), may be included in an amplification reaction, such as PCR, in order to improve the amplification of nucleic acid fragments. Although the salt concentration will depend on the particular reaction and application, in one embodiment, nucleic acid fragments of a particular size may produce optimum results at particular salt concentrations. Larger products may require altered salt concentrations, typically lower salt, in order to produce desired results, while amplification of smaller products may produce better results at higher salt concentrations. One of skill in the art will understand that the presence and/or concentration of a salt, along with alteration of salt concentrations, may alter the stringency of a biological or chemical reaction, and therefore any salt may be used that provides the appropriate conditions for a reaction of the present invention and as described herein. In certain preferred embodiments, when polynucleotide extraction beads such as magnetic beads are utilized, a Plant QuickExtract solution can be used in combination with a KCl buffer in optimized detection methods according to the present disclosure.

[1005] Other components of a biological or chemical reaction may include a cell lysis component in order to break open or lyse a cell for analysis of the materials therein. A cell lysis component may include, but is not limited to, a detergent, a salt as described above, such as NaCl, KCl, ammonium sulfate [(NH4) 2SO4], or others. Detergents that may be appropriate for the invention may include Triton X-100, sodium dodecyl sulfate (SDS), CHAPS (3-[(3-cholamidopropyl)dimethylammonio]-1-propanesulfonate), ethyl trimethyl ammonium bromide, nonyl phenoxypolyethoxylethanol (NP-40). Concentrations of detergents may depend on the particular application and may be specific to the reaction in some cases. Amplification reactions may include dNTPs and nucleic acid primers used at any concentration appropriate for the invention, such as including, but not limited to, a concentration of 100 nM, 150 nM, 200 nM, 250 nM, 300 nM, 350 nM, 400 nM, 450 nM, 500 nM, 550 nM, 600 nM, 650 nM, 700 nM, 750 nM, 800 nM, 850 nM, 900 nM, 950 nM, 1 mM, 2 mM, 3 mM, 4 mM, 5 mM, 6 mM, 7 mM, 8 mM, 9 mM, 10 mM, 20 mM, 30 mM, 40 mM, 50 mM, 60 mM, 70 mM, 80 mM, 90 mM, 100 mM, 150 mM, 200 mM, 250 mM, 300 mM, 350 mM, 400 mM, 450 mM, 500 mM, or the like. Likewise, a polymerase useful in accordance with the invention may be any specific or general polymerase known in the art and useful or the invention, including Taq polymerase, Q5 polymerase, or the like.

[1006] In one embodiment, amplification reagents as described herein may be appropriate for use in hot-start amplification. Hot start amplification may be beneficial In one embodiment to reduce or eliminate dimerization of adaptor molecules or oligos, or to otherwise prevent unwanted amplification products or artifacts and obtain optimum amplification of the desired product. Many components described herein for use in amplification may also be used in hot-start amplification. In one embodiment, reagents, or components appropriate for use with hot-start amplification may be used in place of one or more of the composition components as appropriate. For example, a polymerase or other reagent may be used that exhibits a desired activity at a particular temperature or other reaction condition. In one embodiment, reagents may be used that are designed or optimized for use in hot-start amplification, for example, a polymerase may be activated after transposition or after reaching a particular temperature. Such polymerases may be antibody-based or aptamer-based. Polymerases as described herein are known in the art. Examples of such reagents may include, but are not limited to, hot-start polymerases, hot-start dNTPs, and photo-caged dNTPs. Such reagents are known and available in the art. One of skill in the art will be able to determine the optimum temperatures as appropriate for individual reagents.

[1007] Amplification of nucleic acids may be performed using specific thermal cycle machinery or equipment and may be performed in single reactions or in bulk, such that any desired number of reactions may be performed simultaneously. In one embodiment, amplification may be performed using microfluidic or robotic devices, or may be performed using manual alteration in temperatures to achieve the desired amplification. In one embodiment, optimization may be performed to obtain the optimum reactions conditions for the particular application or materials. One of skill in the art will understand and be able to optimize reaction conditions to obtain sufficient amplification.

[1008] In one embodiment, detection of DNA with the methods or systems of the invention requires transcription of the (amplified) DNA into RNA prior to detection.

[1009] It will be evident that detection methods of the invention can involve nucleic acid amplification and detection procedures in various combinations. The nucleic acid to be detected can be any naturally occurring or synthetic nucleic acid, including but not limited to DNA and RNA, which may be amplified by any suitable method to provide an intermediate product that can be detected. Detection of the intermediate product can be by any suitable method including but not limited to binding and activation of a TnpB protein which produces a detectable signal moiety by direct or collateral activity.

### Helicase-Dependent Amplification

[1010] In helicase-dependent amplification, a helicase enzyme is used to unwind a double stranded nucleic acid to generate templates for primer hybridization and subsequent primer-extension. This process utilizes two oligonucleotide primers, each hybridizing to the 3′-end of either the sense strand containing the target sequence or the anti-sense strand containing the reverse-complementary target sequence. The HDA reaction is a general method for helicase-dependent nucleic acid amplification.

[1011] In combining this method with a TnpB detection system, the target nucleic acid may be amplified by opening R-loops of the target nucleic acid using first and second TnpB complexes. The first and second strand of the target nucleic acid may thus be unwound using a helicase, allowing primers and polymerase to bind and extend the DNA under isothermal conditions.

[1012] The term “helicase” refers here to any enzyme capable of unwinding a double stranded nucleic acid enzymatically. For example, helicases are enzymes that are found in all organisms and in all processes that involve nucleic acid such as replication, recombination, repair, transcription, translation, and RNA splicing. (Kornberg and Baker, DNA Replication, W. H. Freeman and Company (2nd ed. (1992)), especially chapter 11). Any helicase that translocates along DNA or RNA in a 5′ to 3′ direction or in the opposite 3′ to 5′ direction may be used in present embodiments of the invention. This includes helicases obtained from prokaryotes, viruses, archaea, and eukaryotes or recombinant forms of naturally occurring enzymes as well as analogues or derivatives having the specified activity. Examples of naturally occurring DNA helicases, described by Kornberg and Baker in chapter 11 of their book, DNA Replication, W. H. Freeman and Company (2^{nd} ed. (1992)), include E. coli helicase I, II, III, & IV, Rep, DnaB, PriA, PcrA, T4 Gp41helicase, T4 Dda helicase, T7 Gp4 helicases, SV40 Large T antigen, yeast RAD. Additional helicases that may be useful in HDA include RecQ helicase (Harmon and Kowalczykowski, J. Biol. Chem. 276:232-243 (2001)), thermostable UvrD helicases from T. tengcongensis (disclosed in this invention, Example XII) and T. thermophilus (Collins and Mccarthy, Extremophiles. 7:35-41. (2003)), thermostable DnaB helicase from T. aquaticus (Kaplan and Steitz, J. Biol. Chem. 274:6889-6897 (1999)), and MCM helicase from archaeal and eukaryotic organisms ((Grainge et al., Nucleic Acids Res. 31:4888-4898 (2003)).

[1013] A traditional definition of a helicase is an enzyme that catalyzes the reaction of separating/unzipping/unwinding the helical structure of nucleic acid duplexes (DNA, RNA, or hybrids) into single-stranded components, using nucleoside triphosphate (NTP) hydrolysis as the energy source (such as ATP). However, it should be noted that not all helicases fit this definition anymore. A more general definition is that they are motor proteins that move along the single-stranded or double stranded nucleic acids (usually in a certain direction, 3′ to 5′ or 5 to 3, or both), i.e., translocases, that can or cannot unwind the duplexed nucleic acid encountered. In addition, some helicases simply bind and “melt” the duplexed nucleic acid structure without an apparent translocase activity.

[1014] Helicases exist in all living organisms and function in all aspects of nucleic acid metabolism. Helicases are classified based on the amino acid sequences, directionality, oligomerization state and nucleic-acid type and structure preferences. The most common classification method was developed based on the presence of certain amino acid sequences, called motifs. According to this classification helicases are divided into 6 super families: SF1, SF2, SF3, SF4, SF5 and SF6. SF1 and SF2 helicases do not form a ring structure around the nucleic acid, whereas SF3 to SF6 do. Superfamily classification is not dependent on the classical taxonomy.

[1015] DNA helicases are responsible for catalyzing the unwinding of double-stranded DNA (dsDNA) molecules to their respective single-stranded nucleic acid (ssDNA) forms. Although structural and biochemical studies have shown how various helicases can translocate on ssDNA directionally, consuming one ATP per nucleotide, the mechanism of nucleic acid unwinding and how the unwinding activity is regulated remains unclear and controversial (T. M. Lohman, E. J. Tomko, C. G. Wu, “Non-hexameric DNA helicases and translocases: mechanisms and regulation,” Nat Rev Mol Cell Biol 9:391-401 (2008)). Since helicases can potentially unwind all nucleic acids encountered, understanding how their unwinding activities are regulated can lead to harnessing helicase functions for biotechnology applications.

[1016] The term “HDA” refers to Helicase Dependent Amplification, which is an in vitro method for amplifying nucleic acids by using a helicase preparation for unwinding a double stranded nucleic acid to generate templates for primer hybridization and subsequent primer-extension. This process utilizes two oligonucleotide primers, each hybridizing to the 3′-end of either the sense strand containing the target sequence or the anti-sense strand containing the reverse-complementary target sequence. The HDA reaction is a general method for helicase-dependent nucleic acid amplification.

[1017] The invention comprises use of any suitable helicase known in the art. These include, but are not necessarily limited to, UvrD helicase, CRISPR-Cas3 helicase, E. coli helicase I, E. coli helicase II, E. coli helicase III, E. coli helicase IV, Rep helicase, DnaB helicase, PriA helicase, PcrA helicase, T4 Gp41 helicase, T4 Dda helicase, SV40 Large T antigen, yeast RAD helicase, RecD helicase, RecQ helicase, thermostable T. tengcongensis UvrD helicase, thermostable T. thermophilus UvrD helicase, thermostable T. aquaticus DnaB helicase, Dda helicase, papilloma virus El helicase, archaeal MCM helicase, eukaryotic MCM helicase, and T7 Gp4 helicase.

[1018] In particularly preferred embodiments, the helicase comprises a super mutation. In particular embodiments, although the E coli mutation has been described, the mutations were generated by sequence alignment (e.g., D409A/D410A for TteUvrd) and result in thermophilic enzymes working at lower temperatures like 37° C., which is advantageous for amplification methods and systems described herein. In one embodiment, the super mutations is an aspartate to alanine mutation, with position based on sequence alignment. In one embodiment, the super mutant helicase is selected from WP_003870487.1 Thermoanaerobacter ethanolicus 403/404, WP_049660019.1 Bacillus sp. FJAT-27231 407/408, WP_034654680.1 Bacillus megaterium 415/416, WP_095390358.1 Bacillus simplex 407/408, and WP_055343022.1 Paeniclostridium sordellii 402/403.

### Incubating

[1019] Methods of detection and/or extraction using the systems disclosed herein can comprise incubating the sample or set of samples under conditions sufficient to allow binding of the nucleic acid component molecules to one or more target molecules. Extraction can comprise incubating the sample under conditions sufficient to allow release of viral RNA present in the sample, which may comprise incubating at 22° C. to 60° C. for 30 to 70 minutes or at 90° C.-100° C. for about 10 minutes.

[1020] In certain example embodiments, the incubation time of the amplifying and detecting in the present invention may be shortened. The assay may be performed in a period of time required for an enzymatic reaction to occur. One skilled in the art can perform biochemical reactions in 5 minutes (e.g., 5 minute ligation). Incubating may occur at one or more temperatures over timeframes between about 10 minutes and 90 minutes, preferably less than 90 minutes, 75 minutes, 60 minutes, 45 minutes, 30 minutes, 25 minutes, 20 minutes, 15 minutes, or 10 minutes depending on sample, reagents, and components of the system. In one embodiment, incubating for the amplification is performed at one or more temperatures between about 20° C. and 80° C., In one embodiment, about 37° C. In one embodiment, incubating for the amplification is performed at one or more temperatures between about 55° C. and 65° C., between about 59° C. and 61° C., In one embodiment, about 60° C.

### Activating

[1021] In certain example embodiment, activating of the TnpB protein occurs via binding of the TnpB complex via the nucleic acid component molecule to the one or more target molecules, wherein activating the TnpB protein results in modification of the detection construct such that a detectable signal is generated.

### Detecting a Signal

[1022] Detecting may comprise visual observance of a positive signal relative to a control. Detecting may comprise a loss of signal or presence of signal at one or more capture regions, for example colorimetric detection, or fluorescent detection. In certain example embodiments, further modifications may be introduced that further amplify the detectable positive signal. For example, activated TnpB protein collateral activation may be used to generate a secondary target or additional nucleic acid component molecule sequence, or both. In one example embodiment, the reaction solution would contain a secondary target that is spiked in at high concentration. The secondary target may be distinct from the primary target (i.e., the target for which the assay is designed to detect) and in certain instances may be common across all reaction volumes. A secondary nucleic acid component molecule sequence for the secondary target may be protected, e.g., by a secondary structural feature such as a hairpin with an RNA loop, and unable to bind the second target or the TnpB protein. Cleavage of the protecting group by an activated TnpB r protein (i.e., after activation by formation of complex with the primary target(s) in solution) and formation of a complex with free TnpB protein in solution and activation from the spiked in secondary target. In certain other example embodiments, a similar concept is used with free nucleic acid component molecule sequence to a secondary target and protected secondary target. Cleavage of a protecting group off the secondary target would allow additional TnpB protein, nucleic acid component sequence, secondary target sequence to form. In yet another example embodiment, activation of TnpB protein by the primary target(s) may be used to cleave a protected or circularized primer, which would then be released to perform an isothermal amplification reaction, such as those disclosed herein, on a template for either secondary nucleic acid component sequence, secondary target, or both. Subsequent transcription of this amplified template would produce more secondary nucleic acid component molecule sequence and/or secondary target sequence, followed by additional TnpB protein collateral activation.

### Quantifying

[1023] In particular methods, comparing the intensity of the one or more signals to a control is performed to quantify the nucleic acid in the sample. The term “control” refers to any reference standard suitable to provide a comparison to the expression products in the test sample. In one embodiment, the control comprises obtaining a “control sample” from which expression product levels are detected and compared to the expression product levels from the test sample. Such a control sample may comprise any suitable sample, including but not limited to a sample from a control patient (can be stored sample or previous sample measurement) with a known outcome; normal tissue, fluid, or cells isolated from a subject, such as a normal patient or the patient having a condition of interest.

[1024] The intensity of a signal is “significantly” higher or lower than the normal intensity if the signal is greater or less, respectively, than the normal or control level by an amount greater than the standard error of the assay employed to assess amount, and preferably at least 20%, 30%, 40%, 50%, 60%, 70%, 80%, 90%, 100%, 150%, 200%, 300%, 350%, 400%, 500%, 600%, 700%, 800%, 900%, 1000% or than that amount. Alternatively, the signal can be considered “significantly” higher or lower than the normal and/or control signal if the amount is at least about two, and preferably at least about 5%, 10%, 15%, 20%, 25%, 30%, 35%, 40%, 45%, 50%, 55%, 60%, 65%, 70%, 75%, 80%, 85%, 90%, 95%, 100%, 105%, 110%, 115%, 120%, 125%, 130%, 135%, 140%, 145%, 150%, 155%, 160%, 165%, 170%, 175%, 180%, 185%, 190%, 195%, two times, three times, four times, five times, or more, or any range in between, such as 5%-100%, higher or lower, respectively, than the normal and/or control signal. Such significant modulation values can be applied to any metric described herein, such as altered level of expression, altered activity, changes in biomarker inhibition, changes in test agent binding, and the like.

[1025] In one embodiment, the detectable positive signal may be a loss of fluorescent signal or colorimetric relative to a control, as described herein. In one embodiment, the detectable positive signal may be detected on a lateral flow device, as described herein.

### Applications of Detection Methods

[1026] Systems and methods can be designed for the detection and diagnosis of microbes, including bacterial, fungi and viral microbes. In an aspect, the systems may comprise multiplex detection of multiple variants of viral infections, including coronavirus, different viruses which may be related coronaviruses or respiratory viruses, or a combination thereof. In embodiments, assays can be performed for a variety of viruses and viral infections, including acute respiratory infections using the disclosure detailed herein. The systems can comprise two or more TnpB systems to multiplex, as described elsewhere herein, to detect a plurality of respiratory infections or viral infections, including coronavirus. The coronavirus is a positive-sense single stranded RNA family of viruses, infecting a variety of animals and humans. SARS-COV is one type of coronavirus infection, as well as MERS-COV Detection of one or more coronaviruses are envisioned, including the 2019-nCoV detected in Wuhan City. Sequences of the 2019-nCoV are available at GISAID accession no. EPI_ISL_402124 and EPI_ISL_402127-402130, and described in DOI: 10.1101/2020.01.22.914952. Further deposits of the SARS-CoV-2 deposited in the GISAID platform include EP_ISL_402119-402121 and EP_ISL 402123-402124; see also GenBank Accession No. MN908947.3.

[1027] Target molecule detection can comprise two or more detection systems utilizing TnpB proteins. The TnpB protein may preferably be thermostable, with multiplexing designed such that different TnpB proteins with different sequence specificities, operable temperatures, or cutting preferences can be used.

[1028] A multiplex embodiment can be designed to track one or more variants of coronavirus or one or more variants of coronavirus, including SARS-CoV-2, in combination with other viruses, for example, Human respiratory syncytial virus, Middle East respiratory syndrome (MERS) coronavirus, severe acute respiratory syndrome-related (SARS) coronavirus, and influenza. In embodiments, assays can be done in multiplex to detect multiple variants of coronavirus, different viruses which may be related coronaviruses or respiratory viruses, or a combination thereof. In an aspect, each assay can take place in an individual discrete volume. An “individual discrete volume” is a discrete volume or discrete space, such as a container, receptacle, or other defined volume or space that can be defined by properties that prevent and/or inhibit migration of nucleic acids and reagents necessary to carry out the methods disclosed herein, for example a volume or space defined by physical properties such as walls, for example the walls of a well, tube, or a surface of a droplet, which may be impermeable or semipermeable, or as defined by other means such as chemical, diffusion rate limited, electro-magnetic, or light illumination, or any combination thereof. By “diffusion rate limited” (for example diffusion defined volumes) is meant spaces that are only accessible to certain molecules or reactions because diffusion constraints effectively defining a space or volume as would be the case for two parallel laminar streams where diffusion will limit the migration of a target molecule from one stream to the other. By “chemical” defined volume or space is meant spaces where only certain target molecules can exist because of their chemical or molecular properties, such as size, where for example gel beads may exclude certain species from entering the beads but not others, such as by surface charge, matrix size or other physical property of the bead that can allow selection of species that may enter the interior of the bead. By “electro-magnetically” defined volume or space is meant spaces where the electro-magnetic properties of the target molecules or their supports such as charge or magnetic properties can be used to define certain regions in a space such as capturing magnetic particles within a magnetic field or directly on magnets. By “optically” defined volume is meant any region of space that may be defined by illuminating it with visible, ultraviolet, infrared, or other wavelengths of light such that only target molecules within the defined space or volume may be labeled. One advantage to the used of non-walled, or semipermeable is that some reagents, such as buffers, chemical activators, or other agents maybe passed in Applicants' through the discrete volume, while other material, such as target molecules, maybe maintained in the discrete volume or space. Typically, a discrete volume will include a fluid medium, (for example, an aqueous solution, an oil, a buffer, and/or a media capable of supporting cell growth) suitable for labeling of the target molecule with the indexable nucleic acid identifier under conditions that permit labeling. Exemplary discrete volumes or spaces useful in the disclosed methods include droplets (for example, microfluidic droplets and/or emulsion droplets), hydrogel beads or other polymer structures (for example poly-ethylene glycol di-acrylate beads or agarose beads), tissue slides (for example, fixed formalin paraffin embedded tissue slides with particular regions, volumes, or spaces defined by chemical, optical, or physical means), microscope slides with regions defined by depositing reagents in ordered arrays or random patterns, tubes (such as, centrifuge tubes, microcentrifuge tubes, test tubes, cuvettes, conical tubes, and the like), bottles (such as glass bottles, plastic bottles, ceramic bottles, Erlenmeyer flasks, scintillation vials and the like), wells (such as wells in a plate), plates, pipettes, or pipette tips among others. In certain example embodiments, the individual discrete volumes are the wells of a microplate. In certain example embodiments, the microplate is a 96 well, a 384 well, or a 1536 well microplate.

[1029] In certain example embodiments, the systems, devices, and methods, disclosed herein are directed to detecting the presence of one or more microbial agents in a sample, such as a biological sample obtained from a subject. In certain example embodiments, the microbe may be a bacterium, a fungus, a yeast, a protozoan, a parasite, or a virus. Accordingly, the methods disclosed herein can be adapted for use in other methods (or in combination) with other methods that require quick identification of microbe species, monitoring the presence of microbial proteins (antigens), antibodies, antibody genes, detection of certain phenotypes (e.g., bacterial resistance), monitoring of disease progression and/or outbreak, and antibiotic screening. Because of the rapid and sensitive diagnostic capabilities of the embodiments disclosed here, detection of microbe species type, down to a single nucleotide difference, and the ability to be deployed as a POC device, the embodiments disclosed herein may be used as guide therapeutic regimens, such as a selection of the appropriate antibiotic or antiviral. The embodiments disclosed herein may also be used to screen environmental samples (air, water, surfaces, food etc.) for the presence of microbial contamination.

[1030] Disclosed is a method to identify microbial species, such as bacterial, viral, fungal, yeast, or parasitic species, or the like. Particular embodiments disclosed herein describe methods and systems that will identify and distinguish microbial species within a single sample, or across multiple samples, allowing for recognition of many different microbes. The present methods allow the detection of pathogens and distinguishing between two or more species of one or more organisms, e.g., bacteria, viruses, yeast, protozoa, and fungi or a combination thereof, in a biological or environmental sample, by detecting the presence of a target nucleic acid sequence in the sample. A positive signal obtained from the sample indicates the presence of the microbe. Multiple microbes can be identified simultaneously using the methods and systems of the invention, by employing the use of more than one effector protein, wherein each effector protein targets a specific microbial target sequence. In this way, a multi-level analysis can be performed for a particular subject in which any number of microbes can be detected at once, for example, a subject with unknown respiratory infection, having symptoms of coronavirus, or an individual at risk or having been exposed to coronavirus. In one embodiment, simultaneous detection of multiple microbes may be performed using a set of probes that can identify one or more microbial species.

### Microbe Detection

[1031] In one embodiment, a method for detecting microbes in samples is provided comprising distributing a sample or set of samples into one or more individual discrete volumes, the individual discrete volumes comprising a TNPB system as described herein; incubating the sample or set of samples under conditions sufficient to allow binding of the one or more nucleic acid component molecules to one or more microbe-specific targets; activating the TnpB protein via binding of the one or more nucleic acid component molecules to the one or more target molecules, wherein activating the TnpB protein results in modification of the RNA-based masking construct such that a detectable positive signal is generated; and detecting the detectable positive signal, wherein detection of the detectable positive signal indicates a presence of one or more target molecules in the sample. The one or more target molecules may be mRNA, gDNA (coding or non-coding), trRNA, or rRNA comprising a target nucleotide tide sequence that may be used to distinguish two or more microbial species/strains from one another. The nucleic acid component molecules may be designed to detect target sequences. The embodiments disclosed herein may also utilize certain steps to improve hybridization between nucleic acid component molecule and target RNA sequences. Methods for enhancing ribonucleic acid hybridization are disclosed in WO 2015/085194, entitled “Enhanced Methods of Ribonucleic Acid Hybridization” which is incorporated herein by reference. The microbe-specific target may be RNA or DNA or a protein. If DNA method may further comprise the use of DNA primers that introduce a RNA polymerase promoter as described herein. If the target is a protein than the method will utilize aptamers and steps specific to protein detection described herein.

### Detection of Single Nucleotide Variants

[1032] In one embodiment, one or more identified target sequences may be detected using nucleic acid component molecules that are specific for and bind to the target sequence as described herein. The systems and methods of the present invention can distinguish even between single nucleotide polymorphisms present among different microbial species and therefore, use of multiple nucleic acid component molecules in accordance with the invention may further expand on or improve the number of target sequences that may be used to distinguish between species. For example, in one embodiment, the one or more nucleic acid component molecules may distinguish between microbes at the species, genus, family, order, class, phylum, kingdom, or phenotype, or a combination thereof.

Detection Based on rRNA Sequences

[1033] In certain example embodiments, the devices, systems, and methods disclosed herein may be used to distinguish multiple microbial species in a sample. In certain example embodiments, identification may be based on ribosomal RNA sequences, including the 16S, 23S, and 5S subunits. Methods for identifying relevant rRNA sequences are disclosed in U.S. Patent Application Publication No. 2017/0029872. In certain example embodiments, a set of nucleic acid component molecule may be designed to distinguish each species by a variable region that is unique to each species or strain. nucleic acid component molecules may also be designed to target RNA genes that distinguish microbes at the genus, family, order, class, phylum, kingdom levels, or a combination thereof. In certain example embodiments where amplification is used, a set of amplification primers may be designed to flanking constant regions of the ribosomal RNA sequence and a nucleic acid component molecule designed to distinguish each species by a variable internal region. In certain example embodiments, the primers and nucleic acid component molecules may be designed to conserved and variable regions in the 16S subunit respectfully. Other genes or genomic regions that uniquely variable across species or a subset of species such as the RecA gene family, RNA polymerase β subunit, may be used as well. Other suitable phylogenetic markers, and methods for identifying the same, are discussed for example in Wu et al. arXiv:1307.8690 [q-bio.GN].

[1034] In certain example embodiments, a method or diagnostic is designed to screen microbes across multiple phylogenetic and/or phenotypic levels at the same time. For example, the method or diagnostic may comprise the use of multiple TnpB systems with different nucleic acid component molecules. A first set of nucleic acid component molecules may distinguish, for example, between mycobacteria, gram positive, and gram-negative bacteria. These general classes can be even further subdivided. For example, nucleic acid components could be designed and used in the method or diagnostic that distinguish enteric and non-enteric within gram negative bacteria. A second set of nucleic acid component molecules can be designed to distinguish microbes at the genus or species level. Thus, a matrix may be produced identifying all mycobacteria, gram positive, gram negative (further divided into enteric and non-enteric) with each genus of species of bacteria identified in a given sample that fall within one of those classes. The foregoing is for example purposes only. Other means for classifying other microbe types are also contemplated and would follow the general structure described above.

### Screening for Drug Resistance

[1035] In certain example embodiments, the devices, systems and methods disclosed herein may be used to screen for microbial genes of interest, for example antibiotic and/or antiviral resistance genes. nucleic acid component molecules may be designed to distinguish between known genes of interest. Samples, including clinical samples, may then be screened using the embodiments disclosed herein for detection of such genes. The ability to screen for drug resistance at POC would have tremendous benefit in selecting an appropriate treatment regime. In certain example embodiments, the antibiotic resistance genes are carbapenemases including KPC, NDM1, CTX-M15, OXA-48. Other antibiotic resistance genes are known and may be found for example in the Comprehensive Antibiotic Resistance Database (Jia et al. “CARD 2017: expansion and model-centric curation of the Comprehensive Antibiotic Resistance Database.” Nucleic Acids Research, 45, D566-573).

[1036] Ribavirin is an effective antiviral that hits a number of RNA viruses. Several clinically important viruses have evolved ribavirin resistance including Foot and Mouth Disease Virus doi:10.1128/JVI.03594-13; polio virus (Pfeifer and Kirkegaard. PNAS, 100(12):7289-7294, 2003); and hepatitis C virus (Pfeiffer and Kirkegaard, J. Virol. 79(4):2346-2355, 2005). A number of other persistent RNA viruses, such as hepatitis and HIV, have evolved resistance to existing antiviral drugs: hepatitis B virus (lamivudine, tenofovir, entecavir) doi:10/1002/hep22900; hepatitis C virus (telaprevir, BILN2061, ITMN-191, SCh6, boceprevir, AG-021541, ACH-806) doi:10.1002/hep.22549; and HIV (many drug resistance mutations) hivb.standford.edu. The embodiments disclosed herein may be used to detect such variants among others.

[1037] Aside from drug resistance, there are a number of clinically relevant mutations that could be detected with the embodiments disclosed herein, such as persistent versus acute infection in LCMV (doi:10.1073/pnas. 1019304108), and increased infectivity of Ebola (Diehl et al. Cell. 2016, 167(4):1088-1098.

[1038] As described herein elsewhere, closely related microbial species (e.g., having only a single nucleotide difference in a given target sequence) may be distinguished by introduction of a synthetic mismatch in the nucleic acid component molecule.

### Monitoring Microbe Outbreaks

[1039] In one embodiment, a TnpB system or methods of use thereof as described herein may be used to determine the evolution of a pathogen outbreak. The method may comprise detecting one or more target sequences from a plurality of samples from one or more subjects, wherein the target sequence is a sequence from a microbe causing the outbreaks. Such a method may further comprise determining a pattern of pathogen transmission, or a mechanism involved in a disease outbreak caused by a pathogen.

[1040] The pattern of pathogen transmission may comprise continued new transmissions from the natural reservoir of the pathogen or subject-to-subject transmissions (e.g., human-to-human transmission) following a single transmission from the natural reservoir or a mixture of both. In one embodiment, the pathogen transmission may be bacterial or viral transmission, in such case, the target sequence is preferably a microbial genome or fragments thereof. In one embodiment, the pattern of the pathogen transmission is the early pattern of the pathogen transmission, i.e. at the beginning of the pathogen outbreak. Determining the pattern of the pathogen transmission at the beginning of the outbreak increases likelihood of stopping the outbreak at the earliest possible time thereby reducing the possibility of local and international dissemination.

[1041] Determining the pattern of the pathogen transmission may comprise detecting a pathogen sequence according to the methods described herein. Determining the pattern of the pathogen transmission may further comprise detecting shared intra-host variations of the pathogen sequence between the subjects and determining whether the shared intra-host variations show temporal patterns. Patterns in observed intrahost and interhost variation provide important insight about transmission and epidemiology (Gire, et al., 2014).

[1042] Detection of shared intra-host variations between the subjects that show temporal patterns is an indication of transmission links between subject (in particular between humans) because it can be explained by subject infection from multiple sources (superinfection), sample contamination recurring mutations (with or without balancing selection to reinforce mutations), or co-transmission of slightly divergent viruses that arose by mutation earlier in the transmission chain (Park, et al., Cell 161(7):1516-1526, 2015). Detection of shared intra-host variations between subjects may comprise detection of intra-host variants located at common single nucleotide polymorphism (SNP) positions. Positive detection of intra-host variants located at common (SNP) positions is indicative of superinfection and contamination as primary explanations for the intra-host variants. Superinfection and contamination can be parted on the basis of SNP frequency appearing as inter-host variants (Park, et al., 2015). Otherwise, superinfection and contamination can be ruled out. In this latter case, detection of shared intra-host variations between subjects may further comprise assessing the frequencies of synonymous and nonsynonymous variants and comparing the frequency of synonymous and nonsynonymous variants to one another. A nonsynonymous mutation is a mutation that alters the amino acid of the protein, likely resulting in a biological change in the microbe that is subject to natural selection. Synonymous substitution does not alter an amino acid sequence. Equal frequency of synonymous and nonsynonymous variants is indicative of the intra-host variants evolving neutrally. If frequencies of synonymous and nonsynonymous variants are divergent, the intra-host variants are likely to be maintained by balancing selection. If frequencies of synonymous and nonsynonymous variants are low, this is indicative of recurrent mutation. If frequencies of synonymous and nonsynonymous variants are high, this is indicative of co-transmission (Park, et al., 2015).

[1043] Like Ebola virus, Lassa virus (LASV) can cause hemorrhagic fever with high case fatality rates. Andersen et al. generated a genomic catalog of almost 200 LASV sequences from clinical and rodent reservoir samples (Andersen, et al., Cell Volume 162, Issue 4, p 738-750, 13 Aug. 2015). Andersen et al. show that whereas the 2013-2015 EVD epidemic is fueled by human-to-human transmissions, LASV infections mainly result from reservoir-to-human infections. Andersen et al. elucidated the spread of LASV across West Africa and show that this migration was accompanied by changes in LASV genome abundance, fatality rates, codon adaptation, and translational efficiency. The method may further comprise phylogenetically comparing a first pathogen sequence to a second pathogen sequence, and determining whether there is a phylogenetic link between the first and second pathogen sequences. The second pathogen sequence may be an earlier reference sequence. If there is a phylogenetic link, the method may further comprise rooting the phylogeny of the first pathogen sequence to the second pathogen sequence. Thus, it is possible to construct the lineage of the first pathogen sequence. (Park, et al., 2015).

[1044] The method may further comprise determining whether the mutations are deleterious or adaptive. Deleterious mutations are indicative of transmission-impaired viruses and dead-end infections, thus normally only present in an individual subject. Mutations unique to one individual subject are those that occur on the external branches of the phylogenetic tree, whereas internal branch mutations are those present in multiple samples (i.e., in multiple subjects). Higher rate of nonsynonymous substitution is a characteristic of external branches of the phylogenetic tree (Park, et al., 2015).

[1045] In internal branches of the phylogenetic tree, selection has had more opportunity to filter out deleterious mutants. Internal branches, by definition, have produced multiple descendent lineages and are thus less likely to include mutations with fitness costs. Thus, lower rate of nonsynonymous substitution is indicative of internal branches (Park, et al., 2015).

[1046] Synonymous mutations, which likely have less impact on fitness, occurred at more comparable frequencies on internal and external branches (Park, et al., 2015).

[1047] By analyzing the sequenced target sequence, such as viral genomes, it is possible to discover the mechanisms responsible for the severity of the epidemic episode such as during the 2014 Ebola outbreak. For example, Gire et al. made a phylogenetic comparison of the genomes of the 2014 outbreak to all 20 genomes from earlier outbreaks suggests that the 2014 West African virus likely spread from central Africa within the past decade. Rooting the phylogeny using divergence from other ebolavirus genomes was problematic (6, 13). However, rooting the tree on the oldest outbreak revealed a strong correlation between sample date and root-to-tip distance, with a substitution rate of 8×10-4 per site per year (13). This suggests that the lineages of the three most recent outbreaks all diverged from a common ancestor at roughly the same time, around 2004, which supports the hypothesis that each outbreak represents an independent zoonotic event from the same genetically diverse viral population in its natural reservoir. They also found out that the 2014 EBOV outbreak might be caused by a single transmission from the natural reservoir, followed by human-to-human transmission during the outbreak. Their results also suggested that the epidemic episode in Sierra Leon might stem from the introduction of two genetically distinct viruses from Guinea around the same time (Gire, et al., 2014).

[1048] It has been also possible to determine how the Lassa virus spread out from its origin point, in particular thanks to human-to-human transmission and even retrace the history of this spread 400 years back (Andersen, et al., Cell 162(4):738-50, 2015).

[1049] In relation to the work needed during the 2013-2015 EBOV outbreak and the difficulties encountered by the medical staff at the site of the outbreak, and more generally, the method of the invention makes it possible to carry out sequencing using fewer selected probes such that sequencing can be accelerated, thus shortening the time needed from sample taking to results procurement. Further, kits and systems can be designed to be usable on the field so that diagnostics of a patient can be readily performed without need to send or ship samples to another part of the country or the world.

[1050] In any method described above, sequencing the target sequence or fragment thereof may be used any of the sequencing processes described above. Further, sequencing the target sequence or fragment thereof may be a near-real-time sequencing. Sequencing the target sequence or fragment thereof may be carried out according to previously described methods (Experimental Procedures: Matranga et al., 2014; and Gire, et al., 2014). Sequencing the target sequence or fragment thereof may comprise parallel sequencing of a plurality of target sequences. Sequencing the target sequence or fragment thereof may comprise Illumina sequencing.

[1051] Analyzing the target sequence or fragment thereof that hybridizes to one or more of the selected probes may be an identifying analysis, wherein hybridization of a selected probe to the target sequence or a fragment thereof indicates the presence of the target sequence within the sample.

[1052] Currently, primary diagnostics are based on the symptoms a patient has. However, various diseases may share identical symptoms so that diagnostics rely much on statistics. For example, malaria triggers flu-like symptoms: headache, fever, shivering, joint pain, vomiting, hemolytic anemia, jaundice, hemoglobin in the urine, retinal damage, and convulsions. These symptoms are also common for septicemia, gastroenteritis, and viral diseases. Amongst the latter, Ebola hemorrhagic fever has the following symptoms fever, sore throat, muscular pain, headaches, vomiting, diarrhea, rash, decreased function of the liver and kidneys, internal and external hemorrhage.

[1053] When a patient is presented to a medical unit, for example in tropical Africa, basic diagnostics will conclude to malaria because statistically, malaria is the most probable disease within that region of Africa. The patient is consequently treated for malaria although the patient might not actually have contracted the disease, and the patient ends up not being correctly treated. This lack of correct treatment can be life-threatening especially when the disease the patient contracted presents a rapid evolution. It might be too late before the medical staff realizes that the treatment given to the patient is ineffective and comes to the correct diagnostics and administers the adequate treatment to the patient.

[1054] The method of the invention provides a solution to this situation. Indeed, because the number of nucleic acid component molecules can be dramatically reduced, this makes it possible to provide on a single chip selected probes divided into groups, each group being specific to one disease, such that a plurality of diseases, e.g., viral infection, can be diagnosed at the same time. Thanks to the invention, more than 3 diseases can be diagnosed on a single chip, preferably more than 4, 5, 6, 7, 8, 9, 10, 11, 12, 13, 14, 15, 16, 17, 18, 19, 20 diseases at the same time, preferably the diseases that most commonly occur within the population of a given geographical area. Since each group of selected probes is specific to one of the diagnosed diseases, a more accurate diagnosis can be performed, thus diminishing the risk of administering the wrong treatment to the patient.

[1055] In other cases, a disease such as a viral infection may occur without any symptoms or had caused symptoms but dissipated before the patient is presented to the medical staff. In such cases, either the patient does not seek any medical assistance, or the diagnostics is complicated due to the absence of symptoms on the day of the presentation.

[1056] The present invention may also be used in concert with other methods of diagnosing disease, identifying pathogens, and optimizing treatment based upon detection of nucleic acids, such as mRNA in crude, non-purified samples.

[1057] The method of the invention also provides a powerful tool to address this situation. Indeed, since a plurality of groups of selected nucleic acid component molecules, each group being specific to one of the most common diseases that occur within the population of the given area, are comprised within a single diagnostic, the medical staff only need to contact a biological sample taken from the patient with the chip. Reading the chip reveals the diseases the patient has contracted.

[1058] In some cases, the patient is presented to the medical staff for diagnostics of particular symptoms. The method of the invention makes it possible not only to identify which disease causes these symptoms but at the same time determine whether the patient suffers from another disease he was not aware of.

[1059] This information might be of utmost importance when searching for the mechanisms of an outbreak. Indeed, groups of patients with identical viruses also show temporal patterns suggesting a subject-to-subject transmission links.

### Example Microbes

[1060] The embodiment disclosed herein may be used to detect a number of different microbes. The term microbe as used herein includes bacteria, fungus, protozoa, parasites, and viruses.

### Bacteria

[1061] The following provides an example list of the types of microbes that might be detected using the embodiments disclosed herein. In certain example embodiments, the microbe is a bacterium. Examples of bacteria that can be detected in accordance with the disclosed methods include without limitation any one or more of (or any combination of) Acinetobacter baumanii, Actinobacillus sp., Actinomycetes, Actinomyces sp. (such as Actinomyces israelii and Actinomyces naeslundii), Aeromonas sp. (such as Aeromonas hydrophila, Aeromonas veronii biovar sobria (Aeromonas sobria), and Aeromonas caviae), Anaplasma phagocytophilum, Anaplasma marginale Alcaligenes xylosoxidans, Acinetobacter baumanii, Actinobacillus actinomycetemcomitans, Bacillus sp. (such as Bacillus anthracis, Bacillus cereus, Bacillus subtilis, Bacillus thuringiensis, and Bacillus stearothermophilus), Bacteroides sp. (such as Bacteroides fragilis), Bartonella sp. (such as Bartonella bacilliformis and Bartonella henselae, Bifidobacterium sp., Bordetella sp. (such as Bordetella pertussis, Bordetella parapertussis, and Bordetella bronchiseptica), Borrelia sp. (such as Borrelia recurrentis, and Borrelia burgdorferi), Brucella sp. (such as Brucella abortus, Brucella canis, Brucella melintensis and Brucella suis), Burkholderia sp. (such as Burkholderia pseudomallei and Burkholderia cepacia), Campylobacter sp. (such as Campylobacter jejuni, Campylobacter coli, Campylobacter lari and Campylobacter fetus), Capnocytophaga sp., Cardiobacterium hominis, Chlamydia trachomatis, Chlamydophila pneumoniae, Chlamydophila psittaci, Citrobacter sp. Coxiella burnetii, Corynebacterium sp. (such as, Corynebacterium diphtheriae, Corynebacterium jeikeum and Corynebacterium), Clostridium sp. (such as Clostridium perfringens, Clostridium difficile, Clostridium botulinum and Clostridium tetani), Eikenella corrodens, Enterobacter sp. (such as Enterobacter aerogenes, Enterobacter agglomerans, Enterobacter cloacae and Escherichia coli, including opportunistic Escherichia coli, such as enterotoxigenic E. coli, enteroinvasive E. coli, enteropathogenic E. coli, enterohemorrhagic E. coli, enteroaggregative E. coli and uropathogenic E. coli) Enterococcus sp. (such as Enterococcus faecalis and Enterococcus faecium) Ehrlichia sp. (such as Ehrlichia chafeensia and Ehrlichia canis), Epidermophyton floccosum, Erysipelothrix rhusiopathiae, Eubacterium sp., Francisella tularensis, Fusobacterium nucleatum, Gardnerella vaginalis, Gemella morbillorum, Haemophilus sp. (such as Haemophilus influenzae, Haemophilus ducreyi, Haemophilus aegyptius, Haemophilus parainfluenzae, Haemophilus haemolyticus and Haemophilus parahaemolyticus, Helicobacter sp. (such as Helicobacter pylori, Helicobacter cinaedi and Helicobacter fennelliae), Kingella kingii, Klebsiella sp. (such as Klebsiella pneumoniae, Klebsiella granulomatis and Klebsiella oxytoca), Lactobacillus sp., Listeria monocytogenes, Leptospira interrogans, Legionella pneumophila, Leptospira interrogans, Peptostreptococcus sp., Mannheimia hemolytica, Microsporum canis, Moraxella catarrhalis, Morganella sp., Mobiluncus sp., Micrococcus sp., Mycobacterium sp. (such as Mycobacterium leprae, Mycobacterium tuberculosis, Mycobacterium paratuberculosis, Mycobacterium intracellulare, Mycobacterium avium, Mycobacterium bovis, and Mycobacterium marinum), Mycoplasm sp. (such as Mycoplasma pneumoniae, Mycoplasma hominis, and Mycoplasma genitalium), Nocardia sp. (such as Nocardia asteroides, Nocardia cyriacigeorgica and Nocardia brasiliensis), Neisseria sp. (such as Neisseria gonorrhoeae and Neisseria meningitidis), Pasteurella multocida, Pityrosporum orbiculare (Malassezia furfur), Plesiomonas shigelloides. Prevotella sp., Porphyromonas sp., Prevotella melaninogenica, Proteus sp. (such as Proteus vulgaris and Proteus mirabilis), Providencia sp. (such as Providencia alcalifaciens, Providencia rettgeri and Providencia stuartii), Pseudomonas aeruginosa, Propionibacterium acnes, Rhodococcus equi, Rickettsia sp. (such as Rickettsia rickettsii, Rickettsia akari and Rickettsia prowazekii, Orientia tsutsugamushi (formerly: Rickettsia tsutsugamushi) and Rickettsia typhi), Rhodococcus sp., Serratia marcescens, Stenotrophomonas maltophilia, Salmonella sp. (such as Salmonella enterica, Salmonella typhi, Salmonella paratyphi, Salmonella enteritidis, Salmonella cholerasuis and Salmonella typhimurium), Serratia sp. (such as Serratia marcesans and Serratia liquifaciens), Shigella sp. (such as Shigella dysenteriae, Shigella flexneri, Shigella boydii and Shigella sonnei), Staphylococcus sp. (such as Staphylococcus aureus, Staphylococcus epidermidis, Staphylococcus hemolyticus, Staphylococcus saprophyticus), Streptococcus sp. (such as Streptococcus pneumoniae (for example chloramphenicol-resistant serotype 4 Streptococcus pneumoniae, spectinomycin-resistant serotype 6B Streptococcus pneumoniae, streptomycin-resistant serotype 9V Streptococcus pneumoniae, erythromycin-resistant serotype 14 Streptococcus pneumoniae, optochin-resistant serotype 14 Streptococcus pneumoniae, rifampicin-resistant serotype 180 Streptococcus pneumoniae, tetracycline-resistant serotype 19F Streptococcus pneumoniae, penicillin-resistant serotype 19F Streptococcus pneumoniae, and trimethoprim-resistant serotype 23F Streptococcus pneumoniae, chloramphenicol-resistant serotype 4 Streptococcus pneumoniae, spectinomycin-resistant serotype 6B Streptococcus pneumoniae, streptomycin-resistant serotype 9V Streptococcus pneumoniae, optochin-resistant serotype 14 Streptococcus pneumoniae, rifampicin-resistant serotype 18° C. Streptococcus pneumoniae, penicillin-resistant serotype 19F Streptococcus pneumoniae, or trimethoprim-resistant serotype 23F Streptococcus pneumoniae), Streptococcus agalactiae, Streptococcus mutans, Streptococcus pyogenes, Group A streptococci, Streptococcus pyogenes, Group B streptococci, Streptococcus agalactiae, Group (streptococci, Streptococcus anginosus, Streptococcus equismilis, Group D streptococci, Streptococcus bovis, Group F streptococci, and Streptococcus anginosus Group G streptococci), Spirillum minus, Streptobacillus moniliformi, Treponema sp. (such as Treponema carateum, Treponema petenue, Treponema pallidum and Treponema endemicum, Trichophyton rubrum, T. mentagrophytes, Tropheryma whippelii, Ureaplasma urealyticum, Veillonella sp., Vibrio sp. (such as Vibrio cholerae, Vibrio parahemolyticus, Vibrio vulnificus, Vibrio parahaemolyticus, Vibrio vulnificus, Vibrio alginolyticus, Vibrio mimicus, Vibrio hollisae, Vibrio fluvialis, Vibrio metchnikovii, Vibrio damsela and Vibrio furnisii), Yersinia sp. (such as Yersinia enterocolitica, Yersinia pestis, and Yersinia pseudotuberculosis) and Xanthomonas maltophilia among others.

### Fungi

[1062] In certain example embodiments, the microbe is a fungus or a fungal species. Examples of fungi that can be detected in accordance with the disclosed methods include without limitation any one or more of (or any combination of), Aspergillus, Blastomyces, Candidiasis, Coccidiodomycosis, Cryptococcus neoformans, Cryptococcus gatti, sp. Histoplasma sp. (such as Histoplasma capsulatum), Pneumocystis sp. (such as Pneumocystis jirovecii), Stachybotrys (such as Stachybotrys chartarum), Mucroymcosis, Sporothrix, fungal eye infections ringworm, Exserohilum, Cladosporium.

[1063] In certain example embodiments, the fungus is a yeast. Examples of yeast that can be detected in accordance with disclosed methods include without limitation one or more of (or any combination of), Aspergillus species (such as Aspergillus fumigatus, Aspergillus flavus and Aspergillus clavatus), Cryptococcus sp. (such as Cryptococcus neoformans, Cryptococcus gattii, Cryptococcus laurentii and Cryptococcus albidus), a Geotrichum species, a Saccharomyces species, a Hansenula species, a Candida species (such as Candida albicans), a Kluyveromyces species, a Debaryomyces species, a Pichia species, or combination thereof. In certain example embodiments, the fungi are a mold. Example molds include, but are not limited to, a Penicillium species, a Cladosporium species, a Byssochlamys species, or a combination thereof.

### Protozoa

[1064] In certain example embodiments, the microbe is a protozoan. Examples of protozoa that can be detected in accordance with the disclosed methods and devices include, without limitation, any one or more of (or any combination of), Euglenozoa, Heterolobosea, Diplomonadida, Amoebozoa, Blastocystic, and Apicomplexa. Example Euglenoza include, but are not limited to, Trypanosoma cruzi (Chagas disease), T. brucei gambiense, T. brucei rhodesiense, Leishmania braziliensis, L. infantum, L. mexicana, L. major, L. tropica, and L. donovani. Example Heterolobosea include, but are not limited to, Naegleria fowleri. Example Diplomonadids include, but are not limited to, Giardia intestinalis (G. lamblia, G. duodenalis). Example Amoebozoa include, but are not limited to, Acanthamoeba castellanii, Balamuthia madrillaris, Entamoeba histolytica. Example Blastocysts include, but are not limited to, Blastocystic hominis. Example Apicomplexa include, but are not limited to, Babesia microti, Cryptosporidium parvum, Cyclospora cayetanensis, Plasmodium falciparum, P. vivax, P. ovale, P. malariae, and Toxoplasma gondii.

### Parasites

[1065] In certain example embodiments, the microbe is a parasite. Examples of parasites that can be detected in accordance with disclosed methods include without limitation one or more of (or any combination of), an Onchocerca species and a Plasmodium species.

### Viruses

[1066] In certain example embodiments, the systems, devices, and methods, disclosed herein are directed to detecting viruses in a sample. The embodiments disclosed herein may be used to detect viral infection (e.g., of a subject or plant), or determination of a viral strain, including viral strains that differ by a single nucleotide polymorphism. The virus may be a DNA virus, a RNA virus, or a retrovirus. Non-limiting example of viruses useful with the present invention include, but are not limited to Ebola, measles, SARS, Chikungunya, hepatitis, Marburg, yellow fever, MERS, Dengue, Lassa, influenza, rhabdovirus or HIV. A hepatitis virus may include hepatitis A, hepatitis B, or hepatitis C. An influenza virus may include, for example, influenza A or influenza B. An HIV may include HIV 1 or HIV 2. In certain example embodiments, the viral sequence may be a human respiratory syncytial virus, Sudan ebola virus, Bundibugyo virus, Tai Forest ebola virus, Reston ebola virus, Achimota, Aedes flavivirus, Aguacate virus, Akabane virus, Alethinophid reptarenavirus, Allpahuayo mammarenavirus, Amapari mmarenavirus, Andes virus, Apoi virus, Aravan virus, Aroa virus, Arumwot virus, Atlantic salmon paramyxovirus, Australian bat lyssavirus, Avian bornavirus, Avian metapneumovirus, Avian paramyxoviruses, penguin or Falkland Islandsvirus, BK polyomavirus, Bagaza virus, Banna virus, Bat herpesvirus, Bat sapovirus, Bear Canon mammarenavirus, Beilong virus, Betacoronavirus, Betapapillomavirus 1-6, Bhanja virus, Bokeloh bat lyssavirus, Borna disease virus, Bourbon virus, Bovine hepacivirus, Bovine parainfluenza virus 3, Bovine respiratory syncytial virus, Brazoran virus, Bunyamwera virus, Caliciviridae virus. California encephalitis virus, Candiru virus, Canine distemper virus, Canine pneumovirus, Cedar virus, Cell fusing agent virus, Cetacean morbillivirus, Chandipura virus, Chaoyang virus, Chapare mammarenavirus, Chikungunya virus, Colobus monkey papillomavirus, Colorado tick fever virus, Cowpox virus, Crimean-Congo hemorrhagic fever virus, Culex flavivirus, Cupixi mammarenavirus, Dengue virus, Dobrava-Belgrade virus, Donggang virus, Dugbe virus, Duvenhage virus, Eastern equine encephalitis virus, Entebbe bat virus, Enterovirus A-D, European bat lyssavirus 1-2, Eyach virus, Feline morbillivirus, Fer-de-Lance paramyxovirus, Fitzroy River virus, Flaviviridae virus, Flexal mammarenavirus, GB virus C, Gairo virus, Gemycircularvirus, Goose paramyxovirus SF02, Great Island virus, Guanarito mammarenavirus, Hantaan virus, Hantavirus Z10, Heartland virus, Hendra virus, Hepatitis A/B/C/E, Hepatitis delta virus, Human bocavirus, Human coronavirus, Human endogenous retrovirus K, Human enteric coronavirus, Human genital-associated circular DNA virus-1, Human herpesvirus 1-8, Human immunodeficiency virus 1/2, Human mastadenovirus A-G, Human papillomavirus, Human parainfluenza virus 1-4, Human paraechovirus, Human picornavirus, Human smacovirus, Ikoma lyssavirus, Ilheus virus, Influenza A-C, Ippy mammarenavirus, Irkut virus, J-virus, JC polyomavirus, Japanese encephalitis virus, Junin mammarenavirus, KI polyomavirus, Kadipiro virus, Kamiti River virus, Kedougou virus, Khujand virus, Kokobera virus, Kyasanur forest disease virus, Lagos bat virus, Langat virus, Lassa mammarenavirus, Latino mammarenavirus, Leopards Hill virus, Liao ning virus, Ljungan virus, Lloviu virus, Louping ill virus, Lujo mammarenavirus, Luna mammarenavirus, Lunk virus, Lymphocytic choriomeningitis mammarenavirus, Lyssavirus Ozernoe, MSSI2\0.225 virus, Machupo mammarenavirus, Mamastrovirus 1, Manzanilla virus, Mapuera virus, Marburg virus, Mayaro virus, Measles virus, Menangle virus, Mercadeo virus, Merkel cell polyomavirus, Middle East respiratory syndrome coronavirus, Mobala mammarenavirus, Modoc virus, Moijang virus, Mokolo virus, Monkeypox virus, Montana myotis leukoenchalitis virus, Mopeia lassa virus reassortant 29, Mopeia mammarenavirus, Morogoro virus, Mossman virus, Mumps virus, Murine pneumonia virus, Murray Valley encephalitis virus, Nariva virus, Newcastle disease virus, Nipah virus, Norwalk virus, Norway rat hepacivirus, Ntaya virus, O'nyong-nyong virus, Oliveros mammarenavirus, Omsk hemorrhagic fever virus, Oropouche virus, Parainfluenza virus 5, Parana mammarenavirus, Parramatta River virus, Peste-des-petits-ruminants virus, Pichande mammarenavirus, Picornaviridae virus, Pirital mammarenavirus, Piscihepevirus A, Porcine parainfluenza virus 1, porcine rubulavirus, Powassan virus, Primate T-lymphotropic virus 1-2, Primate erythroparvovirus 1, Punta Toro virus, Puumala virus, Quang Binh virus, Rabies virus, Razdan virus, Reptile bornavirus 1, Rhinovirus A-B, Rift Valley fever virus, Rinderpest virus, Rio Bravo virus, Rodent Torque Teno virus, Rodent hepacivirus, Ross River virus, Rotavirus A-I, Royal Farm virus, Rubella virus, Sabia mammarenavirus, Salem virus, Sandfly fever Naples virus, Sandfly fever Sicilian virus, Sapporo virus, Sathuperi virus, Seal anellovirus, Semliki Forest virus, Sendai virus, Seoul virus, Sepik virus, Severe acute respiratory syndrome-related coronavirus, Severe fever with thrombocytopenia syndrome virus, Shamonda virus, Shimoni bat virus, Shuni virus, Simbu virus, Simian torque teno virus, Simian virus 40-41, Sin Nombre virus, Sindbis virus, Small anellovirus, Sosuga virus, Spanish goat encephalitis virus, Spondweni virus, St. Louis encephalitis virus, Sunshine virus, TTV-like mini virus, Tacaribe mammarenavirus, Taila virus, Tamana bat virus, Tamiami mammarenavirus, Tembusu virus, Thogoto virus, Thottapalayam virus, Tick-borne encephalitis virus, Tioman virus, Togaviridae virus, Torque teno canis virus, Torque teno douroucouli virus, Torque teno felis virus, Torque teno midi virus, Torque teno sus virus, Torque teno tamarin virus, Torque teno virus, Torque teno zalophus virus, Tuhoko virus, Tula virus, Tupaia paramyxovirus, Usutu virus, Uukuniemi virus, Vaccinia virus, Variola virus, Venezuelan equine encephalitis virus, Vesicular stomatitis Indiana virus, WU Polyomavirus, Wesselsbron virus, West Caucasian bat virus, West Nile virus, Western equine encephalitis virus, Whitewater Arroyo mammarenavirus, Yellow fever virus, Yokose virus, Yug Bogdanovac virus, Zaire ebolavirus, Zika virus, or Zygosaccharomyces bailii virus Z viral sequence. Examples of RNA viruses that may be detected include one or more of (or any combination of) Coronaviridae virus, a Picornaviridae virus, a Caliciviridae virus, a Flaviviridae virus, a Togaviridae virus, a Bornaviridae, a Filoviridae, a Paramyxoviridae, a Pneumoviridae, a Rhabdoviridae, an Arenaviridae, a Bunyaviridae, an Orthomyxoviridae, or a Deltavirus. In certain example embodiments, the virus is Coronavirus, SARS, Poliovirus, Rhinovirus, Hepatitis A, Norwalk virus, Yellow fever virus, West Nile virus, Hepatitis C virus, Dengue fever virus, Zika virus, Rubella virus, Ross River virus, Sindbis virus, Chikungunya virus, Borna disease virus, Ebola virus, Marburg virus, Measles virus, Mumps virus, Nipah virus, Hendra virus, Newcastle disease virus, Human respiratory syncytial virus, Rabies virus, Lassa virus, Hantavirus, Crimean-Congo hemorrhagic fever virus, Influenza, or Hepatitis D virus.

[1067] In certain example embodiments, the virus may be a plant virus selected from the group comprising Tobacco mosaic virus (TMV), Tomato spotted wilt virus (TSWV), Cucumber mosaic virus (CMV), Potato virus Y (PVY), the RT virus Cauliflower mosaic virus (CaMV), Plum pox virus (PPV), Brome mosaic virus (BMV), Potato virus X (PVX), Citrus tristeza virus (CTV), Barley yellow dwarf virus (BYDV), Potato leafroll virus (PLRV), Tomato bushy stunt virus (TBSV), rice tungro spherical virus (RTSV), rice yellow mottle virus (RYMV), rice hoja blanca virus (RHBV), maize rayado fino virus (MRFV), maize dwarf mosaic virus (MDMV), sugarcane mosaic virus (SCMV), Sweet potato feathery mottle virus (SPFMV), sweet potato sunken vein closterovirus (SPSVV), Grapevine fanleaf virus (GFLV), Grapevine virus A (GVA), Grapevine virus B (GVB), Grapevine fleck virus (GFkV), Grapevine leafroll-associated virus-1, -2, and -3, (GLRaV-1, -2, and -3), Arabis mosaic virus (ArMV), or Rupestris stem pitting-associated virus (RSPaV). In a preferred embodiment, the target RNA molecule is part of said pathogen or transcribed from a DNA molecule of said pathogen. For example, the target sequence may be comprised in the genome of an RNA virus. It is further preferred that TnpB protein hydrolyzes said target RNA molecule of said pathogen in said plant if said pathogen infects or has infected said plant. It is thus preferred that the TnpB system is capable of cleaving the target RNA molecule from the plant pathogen both when the TnpB system (or parts needed for its completion) is applied therapeutically, i.e., after infection has occurred or prophylactically, i.e. before infection has occurred.

[1068] In certain example embodiments, the virus may be a retrovirus. Example retroviruses that may be detected using the embodiments disclosed herein include one or more of or any combination of viruses of the Genus Alpharetrovirus, Betaretrovirus, Gammaretrovirus, Deltaretrovirus, Epsilonretrovirus, Lentivirus, Spumavirus, or the Family Metaviridae, Pseudoviridae, and Retroviridae (including HIV), Hepadnaviridae (including Hepatitis B virus), and Caulimoviridae (including Cauliflower mosaic virus).

[1069] In certain example embodiments, the virus is a DNA virus. Example DNA viruses that may be detected using the embodiments disclosed herein include one or more of (or any combination of) viruses from the Family Myoviridae, Podoviridae, Siphoviridae, Alloherpesviridae, Herpesviridae (including human herpes virus, and Varicella Zozter virus), Malocoherpesviridae, Lipothrixviridae, Rudiviridae, Adenoviridae, Ampullaviridae, Ascoviridae, Asfarviridae (including African swine fever virus), Baculoviridae, Cicaudaviridae, Clavaviridae, Corticoviridae, Fuselloviridae, Globuloviridae, Guttaviridae, Hytrosaviridae, Iridoviridae, Maseilleviridae, Mimiviridae, Nudiviridae, Nimaviridae, Pandoraviridae, Papillomaviridae, Phycodnaviridae, Plasmaviridae, Polydnaviruses, Polyomaviridae (including Simian virus 40, JC virus, BK virus), Poxviridae (including Cowpox and smallpox), Sphaerolipoviridae, Tectiviridae, Turriviridae, Dinodnavirus, Salterprovirus, Rhizidovirus, among others. In one embodiment, a method of diagnosing a species-specific bacterial infection in a subject suspected of having a bacterial infection is described as obtaining a sample comprising bacterial ribosomal ribonucleic acid from the subject; contacting the sample with one or more of the probes described, and detecting hybridization between the bacterial ribosomal ribonucleic acid sequence present in the sample and the probe, wherein the detection of hybridization indicates that the subject is infected with Escherichia coli, Klebsiella pneumoniae, Pseudomonas aeruginosa, Staphylococcus aureus, Acinetobacter baumannii, Candida albicans, Enterobacter cloacae, Enterococcus faecalis, Enterococcus faecium, Proteus mirabilis, Staphylococcus agalactiae, or Staphylococcus maltophilia or a combination thereof.

### Coronavirus

[1070] Systems and methods of the presently disclosed invention are designed to detect coronavirus, in an aspect, the target sequence is the 2019-nCoV, also referred to herein as SARS-CoV-2, which causes COVID-19. The coronavirus is a positive-sense single stranded RNA family of viruses, infecting a variety of animals and humans. SARS-COV is one type of coronavirus infection, as well as MERS-COV. Detection of one or more coronaviruses are envisioned, including the SARS-CoV-2 detected in Wuhan City. Sequences of the SARS-CoV-2 are available at GISAID accession no. EPI_ISL_402124 and EPI_ISL_402127-402130, and described in DOI: 10.1101/2020.01.22.914952. Further deposits of the SARS-CoV2 are deposited in the GISAID platform include EP_ISL_402119-402121 and EP_ISL 402123-402124; see also GenBank Accession No. MN908947.3. In an aspect, one may use known SARS and SARS-related coronaviruses or other viruses from one or more hosts to generate a non-redundant alignment. Related viruses can be found, for example in bats.

[1071] In one embodiment, the systems are designed to comprise at least one highly active nucleic acid component polynucleotide which is designed according to the methods disclosed herein. In a preferred embodiment, the nucleic acid component polynucleotide binds to at least one target sequence that is a unique coronavirus genomic sequence, thereby identifying the presence of coronavirus to the exclusion of other viruses. The systems and methods can be designed to detect a plurality of respiratory infections or viral infections, including coronavirus.

[1072] In an aspect the at least one nucleic acid component polynucleotide binds to a coronavirus sequence encoding a polypeptide that is immunostimulatory to a host immune system. Immunostiumulatory polypeptides have the ability to enhance, stimulate, or increase response of the immune system, typically by inducing the activation or activity of a components of the immune system (e.g., an immune cell). In embodiments, the immunostimulatory polypeptide contributes to immune-mediated disease in the host. In an aspect, the host is a mammal, for example, a human, a bat, or a pangolin, that may be infected by a coronavirus. Cyranoski, D. Did pangolins spread the China coronavirus to people? Nature, 7 Feb. 2020. In one embodiment, the nucleic acid component polynucleotide can be designed to detect SARS-CoV-2 or a variant thereof in meat, live animals and humans so that testing can be performed, for example at markets and other public places where sources of contamination can arise.

[1073] Gene targets may comprise ORFlab, N protein, RNA-dependent RNA polymerase (RdRP), E protein, ORF1b-nsp14, Spike glycoprotein(S), or pancorona targets. Molecular assays have been under development and can be used as a starting point to develop nucleic acid component molecules for the methods and systems described herein. See, “Diagnostic detection of 2019-nCoV by real-time RT-PCR” Charite, Berlin Germany (17 Jan. 2020)′ Detection of 2019 novel coronavirus (2019-nCoV) in suspected human cases by RT-PCR—Hong Kong University (23 Jan. 2020); PCR and sequencing protocol for 2019-nCoV—Department of Medical Sciences, Ministry of Public Health, Thailand (updated 28 Jan. 2020); PCR and sequencing protocols for 2019—nCoV-National Institute of Infectious Diseases Japan (24 Jan. 2020); US CDC panel primer and probes—U.S. CDC, USAV—U.S. CDC, USA (28 Jan. 2020); China CDC Primers and probes for detection 2019-nCoV (24 Jan. 2020), incorporated in their entirety by reference. Further, the nucleic acid component molecule design may exploit differences or similarities with SARS-COV. Researchers have recently identified similarities and fifrferences between 2019-nCoV and SARS-COV. “Coronavirus Genome Annotation Reveals Amino Acid Differences with Other SARS Viruses,” genomeweb, Feb. 10, 2020. For example, nucleic acid component molecules based on the 8a protein, which was present in SARS-CoV but absent in SARS-CoV-2, can be utilized to differentiate between the viruses. Similarly, the 8b and 3b proteins have different lengths in SARS-COV and SARS-CoV-2 and can be utilized to design nucleic acid component molecules to detect non-overlapping proteins of nucleotides encoding in the two viruses. Wu et al., Genome Composition and Divergence of the Novel Coronavirus (2019-nCoV) Originating in China, Cell Host & Microbe (2020), DOI: 10.1016/j.chom.2020.02.001, incorporated herein by reference, including all supplemental information, in particular Table S1. Mutations may also be detected, with nucleic acid component and/or primers designed specifically to detect, for example, changes in the SARS-CoV-2 virus. In an embodiment, the nucleic acid component or primer can be designed to detect the D614G mutation in the SARS-CoV-2 spike protein. See, Korber et al., Cell 182, 812-827 (2020); doi: 10.1016/j.cell.2020.06.043.Other mutations in the spike protein can be designed utilizing the COVID-19 viral genome analysis pipeline available at cov.lanl.gov. Further resources to design primers and nucleic acid components to detect coronavirus or coronavirus mutations can be found at Starr, et al., “Deep Mutational Scanning of SARS-CoV-2 Receptor Binding Domain Reveals Constraints in Folding and ACE2 Binding,” Cell, 182, 1-16 (2020); doi: 10.1016/j.cell.2020.08.012.

[1074] The systems and methods of detection can be used to identify single nucleotide variants, detection based on rRNA sequences, screening for drug resistance, monitoring microbe outbreaks, genetic perturbations, and screening of environmental samples, as described in PCT/US2018/054472 filed Oct. 22, 2018 at-[0327], incorporated herein by reference.

[1075] In certain example embodiments, the systems, devices, and methods disclosed herein may be used for biomarker detection. For example, the systems, devices, and method disclosed herein may be used for SNP detection and/or genotyping. The systems, devices and methods disclosed herein may be also used for the detection of any disease state or disorder characterized by aberrant gene expression. Aberrant gene expression includes aberration in the gene expressed, location of expression and level of expression. Multiple transcripts or protein markers related to cardiovascular, immune disorders, and cancer among other diseases may be detected. In certain example embodiments, the embodiments disclosed herein may be used for cell free DNA detection of diseases that involve lysis. In certain example embodiments, the embodiments could be utilized for faster and more portable detection for pre-natal testing of cell-free DNA. The embodiments disclosed herein may be used for screening panels of different SNPs associated with, among others, different coronaviruses, evolving SARS-CoV2, and other related respiratory viral infections. As described herein elsewhere, closely related genotypes/alleles or biomarkers (e.g., having only a single nucleotide difference in a given target sequence) may be distinguished by introduction of a synthetic mismatch in the nucleic acid component molecule.

[1076] In an aspect, the invention relates to a method for detecting target nucleic acids in samples, comprising: distributing a sample or set of samples into one or more individual discrete volumes, the individual discrete volumes comprising a TnpB system according to the invention as described herein; incubating the sample or set of samples under conditions sufficient to allow binding of the one or more nucleic acid component molecules to one or more target molecules; activating the TnpB protein via binding of the one or more nucleic acid component molecules to the one or more target molecules, wherein activating the TnpB protein results in modification of the RNA-based masking construct such that a detectable positive signal is generated; and detecting the detectable positive signal, wherein detection of the detectable positive signal indicates a presence of one or more target molecules in the sample.

[1077] The sensitivity of the assays described herein are well suited for detection of target nucleic acids in a wide variety of biological sample types, including sample types in which the target nucleic acid is dilute or for which sample material is limited. Methods for field deployable and rapid diagnostic assays can be optimized for the type of sample material utilized and can be adapted from approaches used for other assays known in the art. See, e.g., Myhrvold et al., 2018. Biomarker screening may be carried out on a number of sample types including, but not limited to, saliva, urine, blood, feces, sputum, and cerebrospinal fluid. The embodiments disclosed herein may also be used to detect up- and/or down-regulation of genes. For example, a sample may be serially diluted such that only over-expressed genes remain above the detection limit threshold of the assay.

[1078] In one embodiment, the present invention provides steps of obtaining a sample of biological fluid (e.g., urine, blood plasma or serum, sputum, cerebral spinal fluid), and extracting the DNA or RNA. The mutant nucleotide sequence to be detected, may be a fraction of a larger molecule or can be present initially as a discrete molecule.

[1079] In embodiments, DNA is isolated from plasma/serum of a cancer patient. For comparison, DNA samples isolated from neoplastic tissue and a second sample may be isolated from non-neoplastic tissue from the same patient (control), for example, lymphocytes. The non-neoplastic tissue can be of the same type as the neoplastic tissue or from a different organ source. In one embodiment, blood samples are collected, and plasma immediately separated from the blood cells by centrifugation. Serum may be filtered and stored frozen until DNA/RNA extraction.

[1080] In an aspect, sample preparation can comprise methods as disclosed herein to circumvent other RNA extraction methods and can be used with standard amplification techniques such as RT-PCR as well as the TnpB detection methods disclosed herein. In an aspect, the method may comprise a one-step extraction-free RNA preparation method that can be used with samples tested for coronavirus, which may be, in an aspect, a RT-qPCR testing method, a lateral flow detection method or other TnpB detection method disclosed herein. Advantageously, the RNA extraction method can be utilized directly with other testing protocols. In an aspect, the method comprises use of a nasopharyngeal swab, nasal saline lavage, or other nasal sample (e.g., anterior nasal swab) with Quick Extract™ DNA Extraction Solution (QE09050), Lucigen, or QuickExtract Plant DNA Extraction Solution, Lucigen. In an aspect, the sample is diluted 2:1, 1:1 or 1:2 sample: DNA extraction solution. The sample: extraction mix is incubated at about 90° C. to about 98° C., preferably about 95° C. In another aspect, incubation is performed at between about 20° C. to about 90° C., about 22, 23, 24, 25, 26, 27, 28, 29, 30, 31, 32, 33, 34, 35, 36, 37, 38, 39, 40, 41, 42, 43, 44, 45, 46, 47, 48, 49, 50, 51, 52, 53, 54, 55, 56, 57, 58, 59, 60, 61, 62, 63, 64, 65, 66, 67, 68, 69, 70, 71, 72, 73, 74, 75, 76, 77, 78, 79, 80, 81, 82, 83, 84, 85 86, 87, 88, 89 or 90° C. The incubation period can be about 2, 3, 4, 5, 6, 7, 8, 9, 10, 11, 12, 13, 14, 15, 16, 17, 18, 19, 20, 21, 22, 23, 24, 25, 26, 27, 28, 29, or 30 minutes, preferably about 4 to 6 minutes, or about 5 minutes. Incubation time and temperature may vary depending on sample size and quality, and incubation time may increase if using lower temperature. Current CDC Real-Time RT-PCR Diagnostic Panel are as described at fda.gov/media/134922/download, “CDC 2019-Novel Coronavirus (2019-nCoV) Real-Time RT-PCR Diagnostic Panel.” In one embodiment, the DNA extraction solution can remain with the sample subsequent to incubation and be utilized in the next steps fo detection methods. In an aspect, the detection method is an RT-qPCR reaction, and the extraction solution is kept at a concentration of less than 10%, 9%, 8%, 7%, 6%, 5%, 4%, 3% of the reaction mixture, where the reaction mixture comprises the detection reaction reagents, sample, and extraction solution.

[1081] In one embodiment, a bead is utilized with particular embodiments of the invention and may be included with the extraction solution. The bead may be used to capture, concentrate, or otherwise enrich for particular material. The bead may be magnetic and may be provided to capture nucleic acid material. In another aspect, the bead is a silica bead. Beads may be utilized in an extraction step of the methods disclosed herein. Beads can be optionally used with the methods described herein, including with the one-pot methods that allow for concentration of viral nucleic acids from large volume samples, such as saliva or swab samples to allow for a single one-pot reaction method. Concentration of desired target molecules can be increased by about 10-fold, 50-fold, 100-fold, 200-fold, 500-fold, 800-fold, 1000-fold, 1500-fold, 2000-fold, 2500-fold, 3000-fold, or more.

[1082] Magnetic beads in a PEG and salt solution are preferred in an aspect, and in embodiments bind to viral RNA and/or DNA which allows for concentration and lysis concurrently. Silica beads can be used in another aspect. Capture moieties such as oligonucleotide functionalized beads are envisioned for use. The beads may be using with the extraction reagents, allowed to incubate with a sample and the lysis/extraction buffer, thereby concentrating target molecules on the beads. Extraction can be performed as described elsewhere herein, at 22° C.-60° C., with subsequent isothermal amplification and/or TnpB detection performed under conditions as described elsewhere herein. When used with a cartridge device detailed elsewhere herein, a magnet can be activated and the beads collected, with optional flushing of the extraction buffer and one or more washes performed. Advantageously, the beads can be used in the one-pot methods and systems without additional washings of the beads, allowing for a more efficient process without increased risks of contamination in multi-step processes. Beads can be utilized with the isothermal amplifications detailed herein, and the beads can flow into an amplification chamber of the cartridge or be maintained in the pot for the amplification step. Upon heating, nucleic acid can be released off the beads.

[1083] In certain example embodiments, target nucleic acids are detected directly from a crude or unprocessed sample, such as blood, serum, saliva, cebrospinal fluid, sputum, or urine. In certain example embodiments, the target nucleic acid is cell free DNA.

### Kits

[1084] In one aspect, the invention provides kits containing any one or more of the elements disclosed in the above methods and compositions. In one aspect, the invention provides a kit comprising one or more of the components described herein. In one embodiment, the kit comprises the compositions herein and instructions for using the kit. In one embodiment, the kit comprises a vector system and instructions for using the kit. In one embodiment, the kit comprises a delivery system and instructions for using the kit. In one embodiment, the kit comprises a vector system and instructions for using the kit. Elements may be provided individually or in combinations, and may be provided in any suitable container, such as a vial, a bottle, or a tube. The kits may include the nucleic acid component and optionally an unbound protector strand as described herein. The kits may include the nucleic acid component with a protector strand bound to at least partially to a reprogrammable spacer portion of the nucleic acid component sequence (i.e., pnucleic acid component). Thus, the kits may include the pnucleic acid component in the form of a partially double stranded nucleotide sequence as described here. In one embodiment, the kit includes instructions in one or more languages, for example in more than one language. The instructions may be specific to the applications and methods described herein.

[1085] In one embodiment, a kit comprises one or more reagents for use in a process utilizing one or more of the elements described herein. Reagents may be provided in any suitable container. For example, a kit may provide one or more reaction or storage buffers. Reagents may be provided in a form that is usable in a particular assay, or in a form that requires addition of one or more other components before use (e.g., in concentrate or lyophilized form). A buffer can be any buffer, including but not limited to a sodium carbonate buffer, a sodium bicarbonate buffer, a borate buffer, a Tris buffer, a MOPS buffer, a HEPES buffer, and combinations thereof. In one embodiment, the buffer is alkaline. In one embodiment, the buffer has a pH from about 7 to about 10. In one embodiment, the kit comprises one or more oligonucleotides corresponding to a nucleic acid component scaffold, reprogrammable sequence for insertion into a vector so as to operably link the nucleic acid component sequence and a regulatory element. In one embodiment, the kit comprises a homologous recombination template polynucleotide. In one embodiment, the kit comprises one or more of the vectors and/or one or more of the polynucleotides described herein. The kit may advantageously allow to provide all elements of the systems of the invention.

[1086] Various modifications and variations of the described methods, pharmaceutical compositions, and kits of the invention will be apparent to those skilled in the art without departing from the scope and spirit of the invention. Although the invention has been described in connection with specific embodiments, it will be understood that it is capable of further modifications and that the invention as claimed should not be unduly limited to such specific embodiments. Indeed, various modifications of the described modes for carrying out the invention that are obvious to those skilled in the art are intended to be within the scope of the invention. This application is intended to cover any variations, uses, or adaptations of the invention following, in general, the principles of the invention and including such departures from the present disclosure come within known customary practice within the art to which the invention pertains and may be applied to the essential features herein before set forth.

1. A composition comprising a recombinant TnpB polypeptide having one or more catalytic rearrangements relative to a reference TnpB polypeptide, and an engineered nucleic acid components comprising a scaffold and a reprogrammable spacer sequence, the engineered nucleic acid component capable of forming a complex with the TnpB and directing sequence-specific binding of the complex to a target DNA sequence.

2. The composition of claim 1, wherein the recombinant TnpB polypeptide functions as transposase, a RNase, an integrase, a recombinase, a polymerase, a reverse transcriptase, or a nuclease.

3. The composition of claim 1, wherein the recombinant TnpB polypeptide is catalytically inactive.

4. The composition of claim 3, further comprises a functional domain associated with the recombinant TnpB polypeptide.

5. The composition of claim 4, wherein the functional domain is a transposase, an integrase, a nucleobase deaminase, a reverse transcriptase, a recombinase, an integrase, a topoisomerase, a retrotransposon, a phosphatase, a polymerase, a ligase, a helitron, a helicase, a methylase, a demethylase, a translation activator, a translation repressor, a transcription activator, a transcription repressor, a transcription release factor, a chromatin modifier, a histone modifier, or a nuclease.

6. The composition of claim 1, wherein the one or more catalytic rearrangements are in a RuvC domain.

7. The composition of claim 6, wherein the one or more catalytic rearrangements are in a RuvC-I subdomain, a RuvC-II subdomain, or a RuvC-III subdomain.

8. The composition of claim 6, wherein the recombinant TnpB polypeptide has a catalytic rearrangement at a first, second, or third residue of a Death Effector Domain (DED) motif, or a combination thereof.

9. The composition of claim 1, wherein the recombinant TnpB polypeptide comprises an amino acid sequence, selected from:
SEQ ID NO: 1-7, 19-22. 138-140, 148-153, 259-267, 297-299, 300-314, 1484-1489, 1515-1520, 2041-2047, 2051-2057, and 2293-2309 (dead);
SEQ ID NO: 12-154, 1664-1668 (RuvC2+3);
SEQ ID NO: 37-139, 154-200, 281-286, 294-296, 325-483, 1509-1514, 2142-2145, 2158-2196, 2225-2233, and 2240-2244 (RuvC2);
SEQ ID NO: 221-253 and 1542-1571 (Ruv C2/3);
SEQ ID NO: 254-258 (RuvC1+2);
SEQ ID NO: 268-276, 2048-2050, 2090-2121, 2123-2127 (RuvC1);
SEQ ID NO: 277-280 (Ruv C1/2);
SEQ ID NO: 297-293 (RuvC1+2/3), or
SEQ ID NO: 2197-2224 (SpoIIE).

10-17. (canceled)

18. The composition of claim 1, further comprising a homologous recombination donor template comprising a donor sequence for insertion into a target polynucleotide sequence.

19. A vector system comprising one or more vectors encoding the recombinant TnpB polypeptide, and the nucleic acid component of claim 1.

20. An engineered cell comprising the composition of claim 1.

21. A method of modifying a target polynucleotide sequence in a cell, comprising introducing into the cell the composition of claim 1.

22. The method of claim 21, wherein the modifying comprises cleavage of a target DNA sequence.

23. The method of claim 22, wherein the cleavage of the target DNA sequence results in a 5′ overhang.

24. The method of claim 23, wherein the cleavage of the target DNA sequence occurs distal to a target-adjacent motif.

25. The method of claim 24, wherein the cleavage of the target DNA sequence occurs at the spacer sequence's annealing site, or 3′ of the target DNA sequence.

26. The method of claim 21, wherein the recombinant TnpB polypeptide and/or the engineered nucleic acid component are provided via one or more polynucleotides encoding the recombinant TnpB polypeptide and/or nucleic acid component, and wherein the one or more polynucleotides are operably configured to express the TnpB polypeptide and/or the nucleic acid component in the cell.

The application's sequence listing, which the Patent Office published only in electronic form, follows.

SEQUENCE LISTING (2361 sequences)

SEQ ID NO: 1 - protein, 491 aa, synthetic construct
  REGION 1..491: note = Synthetic
ERGVRLAYKFRIYPTAEQRDAIEQNIDASRFVYNHYLRARMEAFERTQQEVRRPKPALDEQGNVQHDEEGREVWERNKDGKVVYHKVPNPGYDPKAKAMSMFDTSKDLTRLKKELVDEGGTPWLKAADATALMYALRNLDAAYQNFFRGLKKGQDVGFPKFKSRKNPVQTYKTGNVRLAGSREDGSEQCAVEAVPSPVPDGWDLADVRWDGIVLPKIGKVKARVHRIPEGTFVNCTVERKASGKYYASINVKEHELPEPQPADGEVGITFGASHWAVTSDGQVVDLPEQIAKLQRRKAIAQRDLARKEPGSANYRKQKAKVARYDEKIAEARKAATHNLTRELVDGYGLIAARQMNSKEMQQHESAATKSLPRKVKKMLNRRTADGNFAEFNRQLAYKSAWANRAFVEVPGDTPTAQVCSRCGHEELILAKDLRPTWTCSECGAKHDRKANGAVNVLEAGKDILSQQEQSYVSKAKSSRAKKRAEEKDPTK

SEQ ID NO: 2 - protein, 465 aa, synthetic construct
  REGION 1..465: note = Synthetic
MSADVPGTRRLSYKYRIYPTEAQKEAIQANIDACRYIYNRLLRMRIGSYQATKPTLKVHVLAPGADPESERPEWLRGEDGEWVYEEVPNPDYDPEAKPLTKFDCSKLVSTIKSQTVSEDGRFFLKEADSTALIYANNNLDAAYQAFFRRVKQGGKPGFPRFKSRRNPMRAYKTAGAVLSRRDGEGWEKLKSLSEAEGKWTHVYLPKVGFVRAKIHRMPQGEQVSCAVRAEADGTYFAVVNVKNAPMPEAAAPVAGPVGITFGVSHWVVDSDGEVRDLPDTSDLERRLTREKRRLSRRKGARKGETKSANFEKQRLKVARLEAKIRRRREYAVHGLTSELSKTREAVASREMASKDMMERDSRTTENIPRKARRSINKGIAEGSFAEVNRQLAYKCAWRGTAFALVPATTATAQTCSACGHVEKAVADDLRPRWRCPECGTVHDRKGNGAQNVPEEGMRLLAEAKE

SEQ ID NO: 3 - protein, 457 aa, synthetic construct
  REGION 1..457: note = Synthetic
EKGYRMAFKYRIYPTADQEEYLQLNFDATRFVYNVFLRKRIDAYERTRKTLRKPVTDDDGEFVRDESGKVVYADVENEGYDPEAKPLSFYDTSRMLTSFKRECLNSDGEAWLAKADATALVYALRNLESAYQGFFRRVKSGGSAGFPKFKRRQGRQSFKIAGRGARIAHEEDDRFARFTIPKLKDPIKLHYHREIEGEIVSCTIERTPAGNYYASFSVKGVERRALPEREDEIGIALGITPWVVTSDGEAVENPHHRKVLQKRLARAQRKLARRQGAKKGEEKSKRFLKQKSRVERIEEKIAEQRRDSTHKLTHMLVSEHGVIITRDMASSSMLRDAEKKSWKLRQSIADANFAEINRQLAYKGEWAGRTVVVVPSDFPTAQVCSKCGHKETVLAKDLRATWTCPECGCRHNRKANGAANVLAAGRDILAGEERAYVTCDAMTTRKKRQKGERKGEL

SEQ ID NO: 4 - protein, 455 aa, synthetic construct
  REGION 1..455: note = Synthetic
KEGYRLAYKFRLYPNRDQQEYFNKCFGCTRFIYNYFLNERIKAYTKTKEHIKKLVVNEEGEPILDESGKRQYEEVSNPEYDPQARSMTFYDTSKALTRLKKETVDEEGHKWLYDADSTALVYALRHLDSAYQNFFRRVKQGEDLGFPKFKSRYNSNQSFTTAKPTVEDNAIVLNKIGRIKAKIHREVKGEIIAATISRNVAGQYYAAIKVKDADIEPLPTKNDEVGITLGLKKWITTSDGQVYVMPEKIKQLEKKLAKEQRKLSRKVGARKGETPSENYKKQKLRVARIQNKIANIRESTTHEATRDIVNNYGVVITREMNPKNMFENDTPVKEKLPRKVQHKMNRAIASANFAEVNRQLAYKSQWAKRAFVELPSDVPTAQVCNHCGYKHVMLIKDLRAEWTCPNCGLVHDRKYNGVKNVLEAGMDVLHNEEESFVMQARKQKKVLESKNNSSC

SEQ ID NO: 5 - protein, 384 aa, synthetic construct
  REGION 1..384: note = Synthetic
AGKAVQFTTIKARLCPTQAQAELFEKTFGCCRYIWNRMLADQQRFYIETDKHFIPTPAKYKNEAPFLREVDNQALIQEHNKLSQAFRVFFKNPECFGPPKFKKKKTDKDSFTACNHKFESGPTIYITKDGIRMTKAGIVKAKFPRRPRNGWKLKRITVEKTKSGKYYCYILYGYEVKTPEAVAPAPETTLGLKYSMGHFYVADNGETADPPHWLRQSYEKIVKIQRQLNRMQPGSKNYLDTVQKYRALHEHIANQRKDFIHKQSSRIANGWDAVCVRDDSMRDVSQKKILPGNALDSGFGMFRECLRYKLARQGKTLIVVDRAALTTRTCSACGFVRNDRPHQKGAWACPKCGARQDREVNAAKNIKAMGLDQYFNQEAARKSA

SEQ ID NO: 6 - protein, 655 aa, synthetic construct
  REGION 1..655: note = Synthetic
EAEEYQLAANAGRLKEGLLGFDLLSNVYRPVYDALNGFAAQLPVDGTTNAQVVGRLMNNIKLGYYPTDPDNIALILKGVQFPEGVTTNLLDPCCGCGKALRQIADGNNCFTYGVELDSARADEAQTRLHRVGFGSFFYSQVSANAFHLLFLNPPYLSVLNENGGRARHEKRFLIESLGALALGGLLVYVIPYYRLTPDICRVLSDNFENLGLWRFTDAEFKKFKQVAVLGTRKKRDEVPQNTQWLEWLAAHPGSIPSLTELPEGRYALPAKPLEVRTFRGENFNEKELERQLGQSDSFQRMMARSELDSGVKRPPLPLSISQIGLIGGSGMINGLIQCDTPHVNQVLIQEHNRLSQAFRVFFKDPSHFGQPNFKKKKTDRDSFTACNHVFESGPTIYTTRDGIRMTKAGIVRAKFSRRPQAWWKLRRVTVEKTRSGKFYCYILYEYEVKTPEPVIPTQETALGLKYSMGHFYVADSGEMADPPRWLKQSQEKLAKIQKRLNRMEPGSKNYQEAVQKYRELHEHIANQRRDFIHKESSRIANGWDAVCMRAASIQDVSTKKVLPGNALDAGFGMFRECLRYKLARQGKPLILVDRYALTTRTCSACGHTRPDRPHRGAWICPKCGARHDREVNAAKNIKAQGLAQYFNSQDLRESA

SEQ ID NO: 7 - protein, 256 aa, synthetic construct
  REGION 1..256: note = Synthetic
MTKAGMIRAVFPRRPQNGWKLKRVTVEKARTGRYYAYVLYESLVQSPEPVLPVPERTLGLKYSLRHFYVDDQGNRADPPRWLKQSQEKLVHLQRRLNRMQPGSKNYEEAVLKYRLLHEHIANQRRDFLHKESRRIANAWDAVCVRGDDLGAMTDTLIQAGSAVKEAGFGMFREMLCYKLARQGKAFIQVDRYLPTTRSCSACGLTRDALHARDYRRSGWVCPECGAVHDREVNAAKNIKARGLEQFFDLQGQDRSA

SEQ ID NO: 8 - protein, 282 aa, synthetic construct
  REGION 1..282: note = Synthetic
MTGPLAVVWSRPLPDGAEPSTVTVSRDRAGRWFVSLLCQCAVEPHLASDSVVGVDAGITSLLTLSTGEKIANPRHERRDRARLALAQRRLARTQKGSANRDKARLKVARVHARITDHRKTSCISSRPGSSATTLGRDGGPERKEHGPEPPPGPRDLGRGVAAAAGHAGVQVPVVRARLGGDQPLVPLEQDLLGVRAHGGGTAARRPRVGMRALRHPARSGHQRRGQHQSRRAGGACLRSWRKTCPGAFPGGRPAVKQEPRRVIAGIAVLQGGEKSILLLTTG

SEQ ID NO: 9 - protein, 553 aa, synthetic construct
  REGION 1..553: note = Synthetic
RVVRRAFKYRFYPTAVQAEQLARTFGCTRYVYNRALAERTRAWSQERHRVTYADTSKMLTGWKRDAETEWLAEPSKGPLQEALRQLQGAFDRFWRKQAGYPKFKRKGQSKESATYYSNCFTYRGGQIRLAKQSEPLDIRWSRPLPEGAVPSQVTVSRNARGQYHVSILVEDTIAEPPSTGRVVGLDAGITSLYTLSTGEKITNPRHEGRDRARLAKACAGQEAEGIPGPGQGPTEGRADSWSDRRSAPRLFAQTLHSTGARKSSDRHRGSECAEHGEESVVVSGDLRCELVRVPVDARVQGRLVRAAGGGDRPVLSVGEDLLGVWGGRLGDAAERAGVDVPMRRRSRSGCERGKEHFGRRSDGGCLRRRCETTSHITCGVATVGETGTSGPESRGDSRSFTAERKSTSETTQQNAMTLSASAITASVADRLARESIVWLTTVGRNDTPVPTPVWFSWSGTEFLIFSQPGTAKLANIGRNPQVALNFNSSPTGGDVSVFTGKARVDADGPSPEEWETYVEKYHEDMAGLDYTPEKFRQDYSTLVRVTPDGLRGW

SEQ ID NO: 10 - protein, 341 aa, synthetic construct
  REGION 1..341: note = Synthetic
RAVKRAFKYRFYPTAVQAEQLARTFGCTRYVYNRALAERTRAWSQEQRRVTYADTSTMLTGWKRDAETEWLAEPSKGPLQESLRQLQGAFEKFWRGQSRYPQFKKKGRSKESATYYSNCFTYRGGQIRLAKQSESLDIRWSRPLPEGAVPSQVTVSRNARGQYHISILVEDTSARTVRGWRRHVLAKKQKGSRNRAKARLKVAKIHGRIADRRRDYLHTLSTRLVRENQVIAIEDLSVRNMVKNRSLSRAISDAGWSEFRSMLEYKANWYGRRVVAVDRFCPSSKTCSVCGEIASTMPLNLREWTCPCGAVHDREVNAARNILAVGLAVAACGDGVRPPRT

SEQ ID NO: 11 - protein, 426 aa, synthetic construct
  REGION 1..426: note = Synthetic
KESKRAYRYRFYPTPVQAQQLSMTFGCVGYVYNRALAERSRVWAQEQRRVDYAETSRMSTQWKRDPETMWLAEPSKGPLQQALRNLQVAFEGFLRKRTGYPQFKKKGKSRDSATYFRNCFTYRSGRLELAKHAEPLDIRWSRPLPTGVVPSQVTVSRDSAGRYHISILVEEEIVEHNPADAVVGVDAGIASLYTFSTGEKVSNPQHEQRDRARLVKAQRALARKQKGSANRAKARVKVARIHSRIVDRRNDHLHKLSTRLVRENQVIAIEDSSVRNMVRNHRLARAISDAAGEATVSETGKLCREAGILVSQARKKSISSRYGVDRCPIGGGPARGEARDAVRLRQPGRAAPALRSGSSAQHVRSGRGGGAGPARPAAPQTRADRDRHRIADHHARPGSAVLPWPRRPRTGRRSSLRGGRRMAVAR

SEQ ID NO: 12 - protein, 433 aa, synthetic construct
  REGION 1..433: note = Synthetic
RRVARPRGGPHGGAALRHLGEAVQEFDGLEENARTGLARRGVVGGPPAVPEGPGHRVPEFPRRSQGQAPRPRTGAPRLKSKRDNRQSIRFAANAAWRITPGGKLRLPKIGDLKVKWSRALPSTPSTVTVIKDRAGRYFASFVVETDASEVLPETTPQTGIDLGLGHFAVLSDGRKVDSPRFLRRAEKRLKKAQRELSRKQRGSSNRGKARVKAARAHVSACGAQVRRARVPAQRGETGTHPKRPTQFVSEQTGIPGLQAREDVNSTTARWGDGGRRRGRLMAAPHGDHPRHAEPGGHRTGDRHGAACAERSAPRRERTAQGVAGAGRVRAGCGRLRRRRPRTSLPGGDLVEIVEEVVAHGTPPRQGAPAHPVRRAARTPGTGRAHRVLGQPPHGPALEPRRPGSVTQVRGDRGLLRARVTGSWRCAVRARLPG

SEQ ID NO: 13 - protein, 494 aa, synthetic construct
  REGION 1..494: note = Synthetic
MQLRYSFRLYPNGPQRSALARAFGCARVVYNDALRTREDARAAGLPFVSSAVLSTAVTAAKSTPQRAWLAEVSAVVLQQSLRDLDTAYRNFFDGLKGKRPRMGAPRFKSRKDNRHTVRFTANARWKITPGGDLSLPKIGDVRVKWSRALPSAPSTVTVVKDAAGRYFASFVVETDPEILPAMDNVVGIDLGLTHFAVLSDGTKIDSPRFLRRAEKKLKRAQRDLSRKAKGSANRLKARIQGRPRARADRRCAARVPPPAFHKDHPREPIGGGGRPGGQGTRPHTHGEVRARRRMVGVRHDAGVQGRQVRPHVPPHRPFRAHLSGVLRVRRQGRPQTARHPRVDMHSVRGRPGPRHQRGGQRRQGCRTGSDSLSSAGKTGTCPGAARRSRNPPRRSDGRGRNPLPLGRGAEVNPPAPPADGLSSVRPAGSRRTGRCAGPSPSGGPGSAGSPPRRSRPGASARARRPVRSGCTRGSSARGRCGRRPAPRRPPRRAG

SEQ ID NO: 14 - protein, 446 aa, synthetic construct
  REGION 1..446: note = Synthetic
VCSGGICRSVSGRGRRSINGIAAGRLMEPGRCCCPGSRPPRTLWEGSTVVLQQSLRDAETAYRNFFASLKGTRKGPRTGAPRFKARKDTRQSIRFTANARWKITDSGRLNLPKIGAVKVKWSRTLPTTPTSVTVVKDSAGRYFASFVIDTDPQADAEQMPATDRTVGIDLGLTHFAVLSDGTKIDSPRFLRRAEKKLKKAQRELSRKQKGSKNREKTRLKVARAHVKITDARHEFHHQLSTKLISENQGIAVEDLSVTGLARTRLANRPRRRLGLIREHAGVQSATVRKDPDQDRPVRADESDLLQPRRQRRAQTPRREGMDLRRMRHRPRPGHQRRNQCQDGRRTGGIGLRSAGKTRTRSGAARRNRKPRIPDRTPCVVAAQQRSRRPESSGFSPRCKSKETQHRTGPHVASYLPRGPVQIQITIFPRVRPRSACAWASAIRSRG

SEQ ID NO: 15 - protein, 447 aa, synthetic construct
  REGION 1..447: note = Synthetic
VLAVQLRYAFRLHPTSGQRAALGRAFGCARVVCNDAVRARREARVQDLPYPRLGLLSRLLITEAKRRPERAWLGEVSAVVLQQALRDCERAYTNFFASLKGERTGTRVGEPRMKSRKDARQSIRFTANARWSLTACGKLSLPKIGAVRVKWSRALPAVPSSVTVVKDAAGRYFASFVIDTDPAADAARMPDTDQTVGIDLGLKHFAVLSDGTKIDSPRFSGCTTPDGHRSSACWRTKPSATAASWSGSAGSSGGDELRPEDRAHAREAEDYLGVLMLTKPGLDPRVQLGDLLAVGQHGVRQPGYEFGTELLTGQRRLLGLGSFHGPTRERSGVADLAVPQPVLQPLDAQATDGRRGLVSGQQRDGALLGQVQAPLQRREKRQEVGSQAVDLTGLVEHHVQASGGEKAQVDSKFVARPQHAHIASDAGLVGDDEGVTGIGLAFTSVGS

SEQ ID NO: 16 - protein, 231 aa, synthetic construct
  REGION 1..231: note = Synthetic
VVCERVKILGASVSCEAGHWYVSIQVEIKRERPPTPAAVVGVDVGIKQTAIVSDGRRLENQRPFALHLKRLGKLQRKLSKKQKTKDPETRQTVFSKNYEKQRLKVACKHAQIATIRADIQHKFTTELARTCGVICIEDLNILGMMANRKLARSVADSAMGQLLQFLKTKVANAGGDLFIVSRWFPSRHPLFVLWACQKAHAAETSDLSVSAVWPGHGPRSQCRLECVVVCN

SEQ ID NO: 17 - protein, 450 aa, synthetic construct
  REGION 1..450: note = Synthetic
TAHKIRINPTPEQVEYFKRACGTRRFIYNWGREQWEKQYQAYKQEQETVPEQERTRTSPSAFALKKQFNEIREQAYPWTYEVTKCVVDQAFDDLSKAYDNFFAGRADYPSYKKKGKSHESFYLSNDKFTVGSHWISIPGLGRFVLDQRQITKGRGKLLRKLGTVNLAEKLRFVEKGKEGTPRKSRTKRKQVICEAVKILGATVCCEAGHWYVSIQVEIKKQRPPAPTSVVGVDVGLKQAAVGSSGRKLENQKPFARHVKKLGKLQRKLSKKQQTKDPQTKRTVVSSNYEKQRLKVARKHQQIANIRRDVQHKFTTELARTCGVIGIEDLNILGMMANRKLARAIADAAMGQLLQFLKTKSTNAGGDLFIASRWFPSRHPLFVLWAYQEEDAAQTSHLSMSGLWAGHGERFERGLEFAVVRNRTASPASRGMSWPSWRVATAGRKMPGELM

SEQ ID NO: 18 - protein, 389 aa, synthetic construct
  REGION 1..389: note = Synthetic
VEYVQRASGTGRFTDNSGREQWEKQYQAYKQEQKIAPEEQRVLTPLNPVQKGPIFAYFSRDFVIKRTFEDLKKAYDNFFVGRVAYPEYKKKVQSHDTIYLSNDTFPVGSHWISIPGPGRFILDRRQTRKNRGKLPRKQVPCQQVMLPGATASWGAGNWYMSLQLDIKKHSPLPCTPITGMDMSLKQATVVLDGRRLENQRPLASHLKQLGKLQRKLSKKQKTSDPETGPTISSHSYEKQQRKVARKHQQIAHIRRDIQHKFTTEVARSSGVIGIEDPNILADVGQSEAGASSRLCGHGATVTVLENASSQCGSGALYRFVPVSFDQVLFVLWACQKAHAPQALNLSVPEPGTGDRPGFERRFTPGLVRDRYASPTSRLKLAVPGSGYDR

SEQ ID NO: 19 - protein, 420 aa, synthetic construct
  REGION 1..420: note = Synthetic
SQKAFRTQLRPTKGQVETFLHWAKVRRGVYNWGRSVKKTRYERHGESVNRQYLRGLASDKKERPGFTHWSDPPFRVIYYALKDVIEAFDGFFDRVERGETPGYPGRRYEGDPTFSVYGNDSGFHVREGEVKIPCMDEPVALEEKGYIPTGGNYNRVTVKKDTGRWIISVGTAVENPIDESRLTPEEQRPELLAVHPGVRVWVAMREKFARAEFPGTFPDTGEPFGGELPTGKTDSDIRHDLPMDRMFDLMNRIDRQQRALSRRQKDSGGWHRARQNLARTFQQLRHLREDATHKMTAKICYDIRPKKLIIQDWNVADLMERPIGDLPRRVERKVKRRMANANIGELYEQIRYKAGWAGVEILEVPASVEVSQRCSRCGTVNEDLGGSKMLECNGCGLEIEREVNALNNYFLEHEAEQVAA

SEQ ID NO: 20 - protein, 405 aa, synthetic construct
  REGION 1..405: note = Synthetic
KSFKTQLDPTTTQAESFVKWAHARTGVFNWARSMRKAGWERYGLRHTREDLDGMATEKKNRGGFGFDVQSPPRRVIFYAIKDCDRAFQNFFRRANKQGKKPGYPKRKYKGDDMRFSVYGSDCKYFEDAIGLPCLENPVSYEETGYVPTDADKYSRVTVSKDEDRWMVSVQCHVEMPIDPDRLRPEKERPAAVALHPGVRVWLASQTLPREGGKHPMETHALPIDRIFELWSRQDRQHKALSRRQTGSSGWESMRHNLSKTSSKLANIREDKTHKSTSHFCYDVRPYHLLIQDWDMSYLMEHGLNGVQRKVERKIKRRMQNANIGAIKSQLKYKAEWAEIDVLLIPEEVPVSRRCSKCGWIDEDLGGSPVFHCEECGYKVGREKNAIENYWIEYEEGNTIHIEDLG

SEQ ID NO: 21 - protein, 623 aa, synthetic construct
  REGION 1..623: note = Synthetic
LRAYKTEIDPTAEQRRALAKHVAGARVAHNWVLERWIELDAARGIARGARALAGHDCAGGEAACMLGYALAALTRGAPVDVRTPRIEQDAPQVTLGAAVVVGLLALFGQHASVAWTPQKRVRYRPASGAAIPDFAATSIDWYSQVAFVRDEQPERFGWLTELSSFAIREAVIDVEDGWKHFFEHIKAGRYERAGRPRFRGRRHAAYHVDQPNPIRITSRTVTIPGIGEVVLKERDYLPVTQEKSHHFPYGGKAIALGLSERDGRWYIALRAEVPDPTPQARGPGRALRDRPVPRVKGRVAGVEVGVVNLSVATQGERSTNIRHLGLRDDDRIARFERLRKLWERRMARRYRAGIATRAQSAGFFEAKRRVAHYHARITDLRDDIVGKSVRQIVDTGVEIVRMRPAGSVHSMLSRNLTNDAQTRNRLAPMVHAARMGDVRRRVAYKMKWIGGRLEEAPQDEPVTKRCALCLTVRETSPGYPNFQCPSCEHIDDRDDNAAANLLQYSSGSDTGEAGPRSAGSKPPERGTTAVTNGRHGGRGNSPSRPRIGPATGDPPERHVQRGRSSSITTPVSEIERLGAAKNGSPQFRGDTARSLADEGNRSQSDVQEVEVSGFLHDASRETL

SEQ ID NO: 22 - protein, 470 aa, synthetic construct
  REGION 1..470: note = Synthetic
ILRAYKVRLDPTVAQLRYLERCTGIARAAYNWTLANWRCWYLWWRVHNEAHLSGRWARLGAKQRRAWKLLSRWNRLNNQDFPPAYDQTKKPTAYSLHAELTEIKRQQFPWMTEVSSYVVREATNDVGLAYKNFFRRLKAGEKGRAAGAPRFRARRPNGSWHADQGSALDVRDDAIWCPGIAKKGSKDEAEGWIRIARGQRGYVPGGLKICGVGFSRVAGKWYAAIRAHAPAREDIARRPGSRLGVEVGVRHLAVTSAGQQFGAVRDIDSLPALERRLKLWQRRAARRFVKGRKTRDQSARWRCAQKEVAKYYAAIARCRADVLHKTSRSIVDTGASTVIVRDMRVRDMIRRDNKRTSEEQRARNALAPMVAKVGMFELRRQLEYKQTWAGGTVVVAPNEHPTTRLCSACGVVRETEPGHPGWTCAACNTRHDRERNAAINLLNFSPSSDGGKASGRTAPKRGRRGCDGTH

SEQ ID NO: 23 - protein, 614 aa, synthetic construct
  REGION 1..614: note = Synthetic
VTQAFRFALDPSPWQERALEAHVRVARYAYNLGMQWTIEALTRRQIEKDTTGKATTKLPDHFTLCRMWTVHKDTSAPCPACRRIVTWADGAWRTRDGGPCLDGPLHAHPMFQCRHCGRPLVRTGADQWQGVGGGCVPGKTHYPLPGLAWVSEASAGTAQAALRAVAAAWKAFFDARAGRRAGRVGRPRFKSRKATAASFQAHGGGLAVPDHRHVRLPKIGPIRSHEKTKKLLRLLKRPPVDCTACGGRGVTAVPATGRNTLPAGYLATAFRVAAGAATPAGFLAAALAAAVGACGARLAACDACNGAGKVPHTRLVRANVTRTASGRWYVALTVETHRDTRSRAVPGGPLGLGTPAYVPKPSRRQRAGGTVGVDFGIRDLVTLSTGHRVPNPRHYETAQRRLAAAQRVFARTQPGSGRREKARRRLARLHERVANLRKDFLSKLASELVHRHSVIAVEGWDVKVAARRADEQLPRRVQRARNRALLTSGIGELRWMITRRAEWYGARVFVTGAHEPTSRTCSACGQVRTKPVPPAEERFTCSACGYTADRRINTARMLARLARRAVDAPSGGESLNARGAGVRPTGPRAGGRPASKREARARPSGRGKAGTPDP

SEQ ID NO: 24 - protein, 526 aa, synthetic construct
  REGION 1..526: note = Synthetic
RIQQAFKYALDPTPAQARMLTSHAGAARYAFNWGLATFATALDAYSAEKTAGVKKPVTKLPGHFDLCKLWTAHKDNPTSDLGWVGQNFSGTYQAALRDAHAAWKAFLDSKNGRRRGRQVGRPRFKSRHRTTAAFQTHGTGLRVADHRHINLPKIGPVRSYEKTKKLRRLLTRPDVTCTTCDGTKEAPAPAPATKSCGDCKGTGHAPHTRIVRGNITRTPSGRWHISLTVETHRDIRTRPSQRQREGGIVGVDWGVRDLATLSTGEVIGNPRHLERNLARLRRAQQDLARKADGSAGREAARLRVARLHGRVANLRRDHLEKVTSRLVHSHTRIVVEGWDVQHAMQHSGDGAPKWVRRDRNRALSDTGIGAARWMLGRKAAWYGSAIVETGPHEPTGRTCSACATARTKPVAPADERFTCPSCGYSGDRRVNTARVLVRLAHTSDAPSSGESLNARGGDVRPAAPSTRPGGQTPTRPSGHIAVHALGKDEEGRDKGKDKEFRGRRSPMKREARSRPPGRGKAGTPDP

SEQ ID NO: 25 - protein, 367 aa, synthetic construct
  REGION 1..367: note = Synthetic
MDRVELQIIDAKHIRLPKIGAVKTFESTRKIGRLLRKNEVPCPACEATGGGPAAAAGGTAAAAVGGTGKCSACKATGTVPAARIVRASVSRDSSGRWFVSLTVARVREIRTAPSARQRDGGPLGIDFGVRDIATLSTGSTIPNPRGLEAHLLRLKKAQQALARSEMGSVRRARTARRVGRIHARVRNLRADFVAKTTTNLIHAHSVIVVEGWDVQQAAQHGSPHLPAKVRSARNRALADTAIGAARWQLQAKAAWYGATVVTTGRHAPTGRQCSACGTVKTTPLRPTQDQFRCAACGTRLDRRLNTARVLAAIAAQHLTGAPGGGEPQNDRGGNISPATLRRGGQSPMKREARTRPPRRGQTGTPGT

SEQ ID NO: 26 - protein, 594 aa, synthetic construct
  REGION 1..594: note = Synthetic
DRVVQQAYRFALAPTDRQIQALNSHAGASRYAYNWGLATVAAALDARAAEKETTGTAVTEVPKHFALCKQWTAYKDAHAGDPDPAEGERRTNTAWVAENSICVYQAALRDAAAAWQAFFDSKAGRRKGRRVGRPKFKKRGRARDSFQVHGDGLRLADATHINLPKIGRVKVCESMRKVTRRLGKGTVPCPECDQTGFEPAPAASKGKTVRACPVCQGTAGSAAAAGSRSGMAEAGGGQPAGTAGRGTAGMQAGQGMGTAAPASSQGTTGSSDTAGTTGTTCSGTGCGGTGKVKPCHACNGALHVPVLRIIRGTVARGSDRRWTVSLTVETVRQIRLLPTARQQAGGVIGVDFGTRELATLSTGEVIDNPRFLAGALRRLQRAQQALSRCEKDSARRADAVTRVGRLHARVRHLREDNLQKITTRLVQTHAVIGMEGFNVQAVAERGSKDLPRKVRARRNRDLADASPGMTRWMITHKGAWDGVRVVVADRHEQTGRTCSRCGQVRATPVPPGRDMFDCGHCGYRGNRRENTARLLALRACSENGSTSAPSSEDDVKHARRDGVSRVTVRRRLQPSLKREASRRSSNGRPGTPGS

SEQ ID NO: 27 - protein, 627 aa, synthetic construct
  REGION 1..627: note = Synthetic
VMQQLAFKVALDPTPRQARAMGSHAGGARFAYNWGIARIAEALKQREAERQAGGEPTTPVPDHFALCKLWTQWKDTAEWVDRATGEVTRGVPWVAENFVGTYQAALRDAARAWANYFDSRTGQRAGRAIGKPRFKSKRTARKSFQVHGSSLRLVSAVKVNLPKIGTVTVMSDDSRHPAMARSRRRVPGQRHMGNRRRSRQLWQRLRHGQALAERAAEILSAAYADGNPDRVLEHLTALADERARARAVAAAEERLQKAKAAAAKAKPEKREKAQQRVAQAEEALRRAQAITANRKDGWSARKLAEVCRTGLITPVQAADLAEVFGLGEQQRAALAEAALQPRLVKATVTLGADGLWWLSLSAEVPVRVRTSPSRRQRERGATGLDLGVRNVVTSSKRLGGDQNLPNPRYLEQALVELRAAQKHLSRCTPGSARHAKAKARVGLIHADVARLREQHHHRLSTRLVRTFAGIAVEGYDLQELARRGSEGLPGEVRRRRNRALADTGAGMLRQQLQYKTARYGSHLVVAEPDAPTGRTCATCGQAKAKPVPPYHEVFACEACGRTRPRRLNTALALEAVAASSGSPHGGSDQPRGEDVRPAASRRGGQSSMKRAARSRPPGRGQTGTPGP

SEQ ID NO: 28 - protein, 603 aa, synthetic construct
  REGION 1..603: note = Synthetic
PRLIQKAYKFALDPTPTQARAFASHAGGARFAYNWGISTYAAALDARKAQTDAGQDPTVDVPNHFALCKAWTQYKDTYRLTGDPDGRPVHWVEDNFVGTYQAALRDAHGAWQKMWDSRNGQRKGRAVGRPRFKKKGRSPDSFQMHGDSLRLDSGRALRPADATARKPLNRAERAKLAPTPGMTPTERSAAQKRLRAGRKARAGHVHGPQVSQSGTIYVNLPKVGPVRVPGRVRIPQVTPSVAGWVDRNSRTARKLLRQLAKAATTGPVVCPTCAGTGTVTVTTKKGERRDTKCGKYHPTVRPEDKLPGCQGKGKVEPARIVRATISRGASGTWWCSITTEQVITVPVITTRRPAHPTRRQLADGSIGVDLGVKYLAVLSTGDTYMNSRFLDSALTDLKRMQKVLSRTAKDSHRRLKARRRVGTLHEQVALMRRDATNRVTTELARKYATISVEGWDAQRLAELGSKDLPKRLRRNRNRALADAAPGMLRWQLEYKTSWYGSTLFKGEPHWETGRICSVCGTARTKPVPLAEEQFRCPQGHVLPRRVNSARVMDRVARGLVAAPATPEPRGGDVRPATPRRGGPSPAKRVARSRKRGKTGTPDP

SEQ ID NO: 29 - protein, 436 aa, synthetic construct
  REGION 1..436: note = Synthetic
AETTAWAYRFPLAPNRKQAAMFASHAGAARYAYNWGITQISEALDAYAAEKAAGVDKPKTKIPGHFDLCKMWTAHKNSTQGMEWVGDNFVGTYQAALRDAATAWKRFLDARKGGGRNVGRPRYKKRGRARESFQMHGSTLAMPDSAHIKLPKIGVVKINGRGYRGPTDPTDPRARAGRVARRLYRALATGQARMVRVTIAREGDGQWWASVTTERTTTRPDRPTRRQRKGGTIGIDVGVRSLLVTSRGDVVPNPAVLERLLQQLRAASRALSRTQPGSRRREKARKQLAALHSQIAMRRKDYAHRVTTELVRGHAGIMVEGWDVQKTAQNGSRDLPRAVRRLRNRRLADAAIGDVRWQLEYKADAYGAAFQRLPADSPTGRTCSSCGAVRDEPVPLTVEEFTCPRCGLRIDRRVNAARAALRCAIKDSESPTGGSD

SEQ ID NO: 30 - protein, 598 aa, synthetic construct
  REGION 1..598: note = Synthetic
VERAFRFCLDVSRAEIRTLERHCGAARWAFNFAHAQFLAQHTVFVQRKQSAAEGLSGRGGEGMLSDLTKAQRREVYRQAVAMVGAENRVLCAELKVVDQHRSRVTHKGKAFLEPGDVPAVGASRLELELYARRVELAALQQANPAEYTVAKRGELTRVRPVLLEMKQELAARGAYRPTSFDIQSIWRARRDLPRDAGGSPWWPEVAIGAFICGFDRAARAWQSWMDSAADRRAGARVGLPRYKRKGQCLDSFTLMNPRRAVIHLEDSRHLRLTGIGTLRLHQPARRLRRLLRAGVADLTSVTVNRSGDRWYVNIQTKVHQIIPAKPTARQRAAGLVAVDLGSNPLAVLSAPLDVCGGGTEIAARKPLIVQEKRLAHLQRAFTRTVKGSKRRHKAARRLGRVHAQIARQRSGFLHTVSKQLATRCAHIAIEDLDLMRLTASARGTVQEPGRNVKVTARFNRHLLDAGLAELRRQLAYKTTWYGSSLIVLDRGEATATKCSRCGERNPSSKVGSKRFTCPHCGLDVNRRVNAARSIYKAACQAASASVACGERDTQNALRDERPPRVGDGAGPSSLKRPPSPEATGGRPSSRVDRVTPAE

SEQ ID NO: 31 - protein, 485 aa, synthetic construct
  REGION 1..485: note = Synthetic
GMSKENDHTVTCIKICLEPNKAQRAQFASFAGSARWAYNFALAIKIGYQKRWFEARKQFIESGLDEKAAGKKASEQVGRMPNYMSIATNEWTQLRDEVCPWYPEVPRRVFVGGFQRADAAFKNWFDSKSGRRSGAAMGWPKFKSKSKSRESFVIANDVQPAFVANLNRYIKTGELADMDYRHIKVPKCGEVRLTPGSAGQLRQLGRTMLAEAKTGELITRITSGTISRLGDRWYVSLVISGPFVPDAISTKRQRRNGVVGVDLGSGRFYATTSEGLSIINPKFVSKYEQELARANRALAKTAKGSAARKKALARLRRVHARSALARDGFSHQVSAWLTSQFAGVAVEKFDLASMLASAKGTVEKPGKNVDVKARFNAHLADVGIASTIDKLLYKGKRDGCRVQVVNTLDNSSTTCAKCGHTCVCGPEQKTFTCPDCGYNAPRQLNSAQYIRQLATVGFDELGLDMTASLTPDTGKRPIAFMTSAH

SEQ ID NO: 32 - protein, 664 aa, synthetic construct
  REGION 1..664: note = Synthetic
VVELTRGFRFALDVSPRVGAELARHAGAARWAYNYALAKKTASYRAWAQRRNALVDAGVGKAEASKRLRAQAALRGREAAAWEYHRKVLVSWTRRNPKLVREPANADPEVLARLRELREDVERGSLEHRRLLAEARAWCDAAKGGQFAAGDRFPSAMDICALWRDERDVVCSGEDGPWHGEVSSYAFSGGFDRAERAWKNWTDSLAGLRAGRAVGFPRFKKKGRSTDSFMLCHDVNHPAIRIEQHQGAGAYHYLQLPKIGRVRTWDDARRLAKLVKSGRAVISSVTISRAADRWYASVVCRIEQDVPVAFKHTAADGTSALYLSHSEAITAAAACAKQALAAQAEQHKRRGDQQAAAKLAQITHALAPCSPGTCADAAERARARQLAQVHGGPVQRVGKNTPTQRVGGLVGVDLGSKHLATLTARLDQSDPGSMTVAAPKSLNTMLGKLARAQQVLSRKMKSSGRRQKAARRVARIHHKVALHRAGALHDVSKRLTTGFTQVAIENLNLVQLTASSKGTAENPGKNVKVKAAFNRHLLDSALGELRRQLTYKSLWYGSELLVLDKGSAPNQTCGQCGERNPNSPPLHARFTCFTCGHTADRTHNSASAIRRLAREQIAAVASDRGDTQNARRASVRPDNPRETGHGAMKREDPGHAAGRGPSSG

SEQ ID NO: 33 - protein, 596 aa, synthetic construct
  REGION 1..596: note = Synthetic
AVTMPVTEVLRAYRFTLDPSDRERAALSRYSGACRWAYNYAVAKKTQAHRAWADRRTAYVEAGLTEAEAKERIKADGAELTDRIKVWDHHRKSLTLTVVGKPPPAAMRSPAGQEALVRRLATARADAAGTSRERALLAEGRAMVNALKAQAFRAGFRTPTATDTSNLWRMERDLPKEEGGSPWWSEVNVYCFTSGFDRAQVAWKYWQDSLSGRHAGQRHGYPRFKKKGHAESFSLFHDVMRPIIRLEGYRRLVMPGLGSIRIHDSGKRLARLVDRGQAVIQSVTVSRGGHRWYASVLAKVQQDVPVLWEHVHDDGTRTPYLSRIQAEKASENGGRVEQIGRPTARQRAGGLVGVDLGSHHLATLSSPLDPADPATAVVHLPRLLADSLARLSKAQRAMSRCQQGSGRWRKATARVSRAHQQVRVRRASFLHGLSKKLATGFTHVAIEDPDITALTTSTEGTRDKPRKNATAKARLNQHLLDAGLGSLRKKLAYKTAWYGSQLVVLDHGEPVTASCATCKERNPSSDPSCSKVHCPSCGAVVHRHVNSTASIVDAAHRKLKTVASDRGETQNARRAPGSPGARKAPGQGASKREDTG

SEQ ID NO: 34 - protein, 533 aa, synthetic construct
  REGION 1..533: note = Synthetic
ALEVTRSFRFALDPTEAQRESFLKSAGACRWAYNYALEKKTRSHQAWVSRRDSLIAKGMSRPQWKAQLRRETADLKASCAAWDHHRRALIRMARSAEPEVAVAPQEPADLVARLAREREEARPGGSGEEYARALARARRMVARHKEELFARGDQIPNQHDMAAMWRTERDLPKEQGGTPWWNEVNVYCFTSGFDRAQAAWNNWMTSASGERGGRRVGYPRFKKKGGCLDSFTLYHDVQKPRIRLDGYRHLIIPTTGRIRIHGSAKRLARLVALGEARVQSVTVTRRAHRWYASVSCKITQRFPAEPTLRQRAGGTVGVDLGSRYLAVLSNGPGTAGGRESVIPHPQFLLRDLPRINCINRRMRRMQPGSREYRRLSARAARRHHLVALRRAGTLHDITKRLSRGYACIAVEDFDLVSLVTSAKGSRSRPGTKVKVKSLFNRRLLDASIGEFRRQLAYKCPQYGSRLIKIDRGEPVATTCSRCGDRNPNAKPSQEKFTCPSCRYTADRHANAAACIYMAALRKMSAVASGSGET

SEQ ID NO: 35 - protein, 509 aa, synthetic construct
  REGION 1..509: note = Synthetic
VETTIRSFRFTLDPTADQEMNLTRHAGAARWAYNWALGHKIAAYDLRRAEISALIESGHTEASAKKATTVRIPSKAAIQKHLNRIKGDSRRHLPEPQAYGPHPPCPWWHEVSTHAFQSAMTDCDTAWDNWVKSVAGKRAGPRVGMPRFKRKGRARDSFRLYGIGLRLDGYRRISLPRIGSVRLHDSARRLGRLITRGIATIKNVTVTRRGSRWYACVLTEVTDASPPTRARRAGGTVGVDLGVRWLITLSRPLDPAVPDSDTTPNPRWIERDARRLRKAHRRFSRTVRGSQRRRRAARALGAIHARVAERRAGHLHRLTKRITTTFDVIGLERFDLVRASASARGTVEQPGTNVGVKSRFNRLLRDAALGETRRQIDYKARRYGSTVVHLAPGTPTNAICSSCAWENPPPRLGTDRFACGKCGLRVRRAVNSARNIERLTHRSVHVAPDTEETRNARGVVSSDASPAPNATTGKREGPQGSPRRSNPSVTGSTPVESETATSAGIPITR

SEQ ID NO: 36 - protein, 591 aa, synthetic construct
  REGION 1..591: note = Synthetic
VLPRLRTRRPRQGPVRPRLAVLLRRRSGNRPHLLVPAPGRPAARTHGRCDTRHRRPAPRGRGTPGPRGTLEAGRPRDPDRDGRRLRRHLPLPLPAGLAGRAARTTALGPRHAPRPGPRPLRTEGRPAPPTRRHPHLRQARHLAPARRHHRHGHHPLRQGRDDGLEPYASPTHPPRPLAGARGRRTTRPARHIDAPDGRAPAGRPRTETGLAVVLRNLGHVGGRGPVVAGLPPPLRPGTHLPTDETDPRMDRTEDPPRRHRRSVDLADHRRTYPALSRPAPHRRPPTALGTTNRTPSPHPRPGQAGVSQRPRDRGRLHHDVKRPRIRLAGYRRLRLPAFGEVRLHESAKRLQRRIDRGEAVVQSVTVSRAGHRWYASVLCKVTSHVPAGPSRAQQRRGTVGVDLGVKVLAGLSQPLTEDDPDSILISNPRPLRSAGCRLVKAHRALARTQRGSARREKAKRRVARLHHEVALRRDTALHALTKRLATSFATVAVEDLHVAGMTRSARGTVAAPGQRVRQKAGLNRAILDSAPGELRRQLAYKTSWTAPSSRSWTAGGPPARPARTAAGKTQARRSPTGCSTAPPAASPWTGT

SEQ ID NO: 37 - protein, 465 aa, synthetic construct
  REGION 1..465: note = Synthetic
MSEITYTQKRDYKEQFQKKAENARRRKETMDTKVFQLKIQENKCNEVQEKFLNHLFIEAKWYYNDCVAFGKSSEENKPWKNDYKKKSVVHYDKDKNPIESEFQFLSGASKQEINKRIGISCKSMCTNLKRGNIKHTKGLQFKSEFNSVPFRQFNNSWKFKGTKIKLQNCSKPYKVRGLEQLLVDGIEFANLSLIQRPSGYYLQITCYVPKEKKEKSEKNYQTVGLDFGCENTLTGYIEETNKSFKLDYRCEQPENQIRVQRKLSRRRVRNFSNRSNKGLRLQRLNRKYYEHQSNQKKDKTNKIIHNLKSYGKVVLQDEMISNWQKSGHGKKISNGILGRLKNRLKSLPNVFVLDKSYPTSKFCFDCFSKNDELKVWDRTYKCPNCGSIMDRDVHAAKNMIAFYHLSELVPMEYRNPKRLKKFILELLGDIKKRVEINSSESIDDIIVSCIQELSGKHEATSLNSW

SEQ ID NO: 38 - protein, 457 aa, synthetic construct
  REGION 1..457: note = Synthetic
MSKSETYLTNFQKRLQTIDRHVKYFDCKVFELKIDQRHLNESDRNNLHKIFVEGKWFTNSLISKAKESGKPLHSSSYQSKDAKFKTVVHLDKDGNKIESSFDILSASSRQGIVMSLKSNIKSIWSNVKAKNIKLTKDLGLKFKSECVCIPLKQYKTDWAIVSKNRIKITRFSKPFRVHGLNQLDKYQDIEFANAKLLHKPDGFYLNITVWIPKQSESIPNINNHQTLGIDFGCRKTLNVYNLERNQALKINVVYEEPEQLKRTSKLINRRFVKKCSNRSNKGFKLRNKLRKQYQKLTNKKNDSTNKIIHWTKQFKLVCFQDDPLKAWSRKHGKKIQHSILGRIKSKLKNNSNTIVIPCDKNHPTSKMCPICSSKNKELGLKEVFKCECGYQEDRDIHAARNMILFATNKVPMECRDPMRVSVIETASKPVEIVTSIETNQIDLLRQVWSEKQETAVL

SEQ ID NO: 39 - protein, 447 aa, synthetic construct
  REGION 1..447: note = Synthetic
VNDRRSICSEDKRRKIRESKKKTLHKRANQVVRCFELKIKTKRLSKIQKEQLAKIFLEAKRFYNHVLNIKRSEDIPLRLINPTHIKSVKHFDKNKDELESQLTVLSSQQKQAIIARMISNEKAIHSLIKGGYQKFGALRFKSEVNCIPLKQYGNAYKFKDDHKVKIQGISKCLFIYGTEQFWKYNCDYANANLLRKPDGYYVKVTCYIDKSKINLPKSNGQELGIDFGCKNNLTFSDGTKLNCQIEESDRLKKLQTKLNRRQKTRSNNRNKTINKIRREYQKATNKKHEFANQLHHKLKLYDLIVIQDEQLSNWQKTYRNGKKIQHSCLGLIKSKLISSPNVVVLDRFIPTTKFCSNCGKIENGLKLSDREFTCSECGIIDDRDIHAAKNMLNIFHLVANHLNEQKLLPSERGKVKFAEFKTAIDGKVFPDVSQNDEARRYQVFSLV

SEQ ID NO: 40 - protein, 431 aa, synthetic construct
  REGION 1..431: note = Synthetic
MMNNKVENRGKCDDGKKLAIKNALLATQLRRQNQVLRCYECKIVEKRLNKRQREELEQLFVEGKWFYNHVLNLRNNGQKLNAINTTSIKTVVHYDKDKNSIESELKVLSGQQKQAILTRMAQNEKAICSLVKRGHQKHGNLQFKSELACIPLKQYGTTYKFKSCNKVKIQGIHGDVLVKTGGQLQIADELANANLVKKPDGYYLKVVCFINKENWKTQKTNGREIGLDFGIKTNITTSEGQKIDVSIEESERLKKLQREMFRREKGSSNRYKTVKKIQREYQKIGNKKSDKANKIVHMLKQYDCIVMQDEQISSWQKGVFGKQVQHSCMGRIKQKLKALPQTILLDKYIPTTKWCPKCGKKHSIGLDERTYVCECGYHEDRDIHSAKNMLSIKNLVFNNKISVPTEYREVTLMEFKTSVKSTGSADVKLER

SEQ ID NO: 41 - protein, 433 aa, synthetic construct
  REGION 1..433: note = Synthetic
MTNKWTTTEEKKAKIKASLSGTREKRKSQVCRVFKVKIQQNRLSKKQKEELKMIFVEAKWVRNYIVGLIKDGIPWNELPVIYSKTEIPVKTKDGAFENRRLNFISASQIQEVIDEVKANLKSIITNIRRKNIKRGELKFVSEIKSIGMKQYKITYSFKGRTGMKIQGVSKKVHVNGLGQFIDEEEIEFANAKVLNQANGYFVTITTYTPKKYFKQETNGKSIGIDFGIKHNLTTSEGETIDCSFEEPESLKKASRKMNHCKKGSNNRMKNRKKLQKYYQKLENRRTNAANQIVAKFKNYNKIVIQDEQLKEWHKGLFSAVVQHSCMGRVKAKLKAMPNVVILDRFIPTTKLCMNCGKVHKIRLSDRTFKCECGIEDDRDIHAAKTMLEIVEMLNLPPEQREVKRAEFLEAYSKKFGCEYGTMKHEDVTFQGCH

SEQ ID NO: 42 - protein, 263 aa, synthetic construct
  REGION 1..263: note = Synthetic
VSRKVHVNGLEQFINEREIEYANVKILNQPDGFFVAVTTYTPKTNFKEKEKVKKSIGIDFGIKHSLTTSEGETMDCSVEETESLKKASKRMNHCVKGSNNRMRNRKKLRKCYQKINNRRTDMANRIVSKLKRYSRVVIQDEQLKNWHKGLFGKQIQHSCLGRIKSKLKTLPNVVVLDRFIPTSKVCMKCGKAHELKLSDRVFSCKCGISEDRDVRAAKNMLEIVDMINVPPEQREVKRAEFLASFQKKFGISYGTVKHEDATF

SEQ ID NO: 43 - protein, 434 aa, synthetic construct
  REGION 1..434: note = Synthetic
MRQACSIEKRLKIKKSMKETREKRSRQVCRVFKIKIDQSKLTNRQAEQLKMMFVEGKWIKNSRLAWAKDNGKSVFDCEAPHKHELIQVKNKDGEFEERELKFIGSQMAQDVVADMKSNLKTIIRLCKSKKQKHGELQFVSEISSLNLRQYGTTYKFKTQKKMKIQGVSGLVRVCGAKQFFEDDNIEIASAKLLNTAKGYYIAISTFTSKEKLEKKPSNGKSIALDLGCQTSITYSDGRKQTVYIEESERMKRLQRKVAKQVKGSNNAKRTRKLIQVEYQKIDNKKQDTSNKIVAGLKYFDNVVIQDEQLANWHKNGHGKAIHHSCLGRIKSKMKNMDNVLILDKFIPTTKICMNCGKVHEIPMSQRTFTCNCGTSEDRDVHAAKNMLELARFILEKDLSVPVGRREFKREEFLKAYEKKFGVGYETMIHEADTL

SEQ ID NO: 44 - protein, 439 aa, synthetic construct
  REGION 1..439: note = Synthetic
MEIDDAKRLAKNKAIADRGRETRIRRHAMECKTFELKIRANKLNLRQKEELSMLFVDAKRYYNDIIAFMKSNDVSDYDWKNTIVSVKTKDGSFEKKEIKYLSASERQAVIAQIKSSLKALATSKRHGAKVGKLRFLSEVNQITLRQPSINYAVDFDRKRVRVQGVHGDIRVGGLSQLVGIDSMEMAFAKLVRTPLGYFLKVTVYFPKAKLKSETNGKCIGIDFGCATSFTTSEGDKIDVSVRESDRLKRLSRKANRISKSARSEHKKHLYFLIAREYAKMDNRKKDIACKLAHRFAQYDQCVIQDEMLQAWHKGGHGKAVQHSCMGSIKARLMANPNIVVLDRSCPTTKLCRECGEIHHEMTQRDRVFKCDCGVSEDRDVHAAENMLWFADHKIGVIKIGVERTKFKRGDLEPLLSDAFASQKQVPETNHEASCSSDKR

SEQ ID NO: 45 - protein, 452 aa, synthetic construct
  REGION 1..452: note = Synthetic
MRNVSEEERLAKNAKIREHGKETREKHSTWKLTIIECKLNEKSFSKLQFEQLQMQFVEAKWLWNDWIGRTDKQSQNYNEQFDTTKEKWQYRPLANQKVQVMTKDKTFEERNCSHIGSQIAQDVIDILRSNIRTLSTLKKKGLQVPRNINYTSEVTSLNLRQYGVTYSFPSQKKIKIQGIKKPFRLRGLEQKMYKIPVWDEFKNGNIDFANAKLVHKPTGYYVQITAFIKPDLLKANPKIEKALGIDFGCSTSFTTSEGEYIDIKVEESEHLKMLQKKLARQKKGSNSRYTTIQLIRKEYQKQTSVKNDKAKQTVAKFKQYDTVVIQDEQLKNWHKNGHGKAIQHSILGRVKSELLKLPNVVVLSKTVPTTKMCTKCGCYHDELKVWNRVFKCDCGVEMERDLHAAKNMLWFYENNIGVERTKFKRVEIEALVKAALNGSEPTSPGKLENTHF

SEQ ID NO: 46 - protein, 249 aa, synthetic construct
  REGION 1..249: note = Synthetic
MDALMSFMIGPRSFLRYFVQFVCYVPKENIKTQKKIEKTIGIDFGCSTSFTTSEGKKISVSVPESGRLKKLQKHQAKKVKGSKNWLRTMKQVKKEYQKITNRKNDLANKIVHEFNQYQTIVIQDEQLKNWHKNGHGKAVQHSVLGRVKSKLLLNPNTVVLGKTVPTTKLCIKCGQWHDEIKVWNRTFKCDCGVEMDRDIHAAQNMVWFYENNVGVERAKVKRLEMKALVDQALAMENQLLSVKDEDSSL

SEQ ID NO: 47 - protein, 441 aa, synthetic construct
  REGION 1..441: note = Synthetic
MTEQERLAKNKQISQTKRNTIDRHSKMLCRTYSVKVQYSSLSKEQKENIQRMFLEAKWLKNYIISWTGFLTKDEEYKKAHKIYDFDAQGCKLITKKDANFKDVEVELSLHSMIKAQIKQDLCSNIKTIKTLKTKGFQKSGGALKFVKEVNSIPLKKYGYTHKIVSSKRVVIAGLGRKGLLVNGLKQFTNIEGLEIANARLLRKANGLYIQFVTYQPKADYIEPKNGKIIGIDFGCSTSFTTSEGEKIDVKIQESERLKRLQRNLSRKEKGSKNFYKNVKLIKVEYLKNTNKKNEQANQLVHKLSKYETVVIQDEMLPKWQQSGHGKAIQRSILGRVKAKLKLLPNVYIIEKSFPTTKLCRKCGAVNDSLKLFDREFRCDCEVIENRDIHAAKNMVHVYNIRKIRAGTAQITPVEIEINGSKNSILTSKKQSQKQEGARSLV

SEQ ID NO: 48 - protein, 432 aa, synthetic construct
  REGION 1..432: note = Synthetic
MDEERRLAKNKLISLRKKETLLRHENMVTKTYEVKIQENKLRKRQREDIERIFLEAKWYKNYILNWMNESKDNKLSKFNTKITQITKKDKDMNDVQVEIKRLPAQSRQCLVSRMVANLRAMAALRKKGLQKLGKLKFSKEETAIDYKQIGNSHKIINKKRIRLQGIKGELLVNGLEQFYNIPGVEVANARLLHRATGYFVQFVCFLPKAYSQETPEAEKKIVGVDFGCQTAFTLSMGEKITASVPESERLKKLQRDFSRKQKGSKNRERAGLKVRKEYQKITNRKNDMANKIVHNMTKNSIVVIQDEQLKAWQSGNHSKAVQYSVLGRVKAKLKLHNNVVILPKNYPTTKLCTNCGKWHDELKLWNRTFKCKCGVEEDRDIHAAQNMVWLYEHIYVGAEHTKLKRVEMESLVKGIINSGDQTLSAKHEAAIP

SEQ ID NO: 49 - protein, 391 aa, synthetic construct
  REGION 1..391: note = Synthetic
VFKVRNEKRNKKAKIFDFLDGCMLNGKWIWNSLVAQTDSKIMGEDKVRKASSFSQKDFKTVVHKDFEGNDIEDSIDFLSAAQRDSVIDSFKHSLSALKALKKKGMKVGRIKFKSEFTSLTLKQYGITHKICGPNSYQIQGCKSELRVAGMRQLRQLEKAGIEYELATAKIVCAGGDYYIHQTVYVDKATWFAYKNRKNSKSKYEINALDLGCQKTATDAYGKTYNTQVEEPERLKKLQRKKARQMKAAGWNPKKKKKVKCSNNQWKVKKAIKREYQKLTNKKETEAIKLTREVLFETEVLIIQDENLTGWHKTGHGKKVQHGILGRVKERLMRSEKTHVINRWVPTTKLCTHCGQIMSELTQRDRHIVCPHCGHDDGERDRHSAQTMIWLY

SEQ ID NO: 50 - protein, 431 aa, synthetic construct
  REGION 1..431: note = Synthetic
MSVEKNIQIAETMRATYEKRSRQICRVFELKVHKQRLNLQQKETLKMMFVEAKWCYNYLLGRMNNEENFDIFSYKGKELLDITHRDKDGNDVPVHLSYITSSLKDSLVARMQSQIKTLSSLKKKGKKVGKLKFKSEYTALGLKQLGTTHKIISSNRIKIQGVKKPLPVNGLKQLSKYGIPDIANAVLVKKCGNYYIYLTVYYDKDTVQKCHKNLELGIDFGCETSLTLSDGRKINAIVEETDRLKSLQRKRDKRVKGSNGRWRLNYKIRKEYLKSTRKKDDLAHKIVHELLRDNETIVMQNEQINSWKRKHGRKVQHGILGRVKSELIRHPEQVFVMSRFVPTTKFCYDCGAIHKDISLWDRSFVCPECGVISDRDIHSAECMVWIYDNLRDKIGLGESEFKRADFDEEVSLIFGRWDSQRVKPEDATSLG

SEQ ID NO: 51 - protein, 254 aa, synthetic construct
  REGION 1..254: note = Synthetic
LAYTICNRYFIALTVYVDNDKKKPSYKNKYIGLDFGIQTTITTSNGDKYDVQVEETDRLKRLQTILNRKVKWSNNWKKTRSLIRKEYTHISNIKDDTARKIVHKLINENEMVIFQDDPINTWNKEEHKGQIQHSILGRVKDLLLHKDNVVVDNVVVLDKYYPTSKYCFDCGTKNDNLTLKDRIFVCPNCGHIEDRDVHAAKNMVQIYLNYINIKTDTVGTTDTDKKPLEIKYDNSLLWSKFESTKENTGSLALC

SEQ ID NO: 52 - protein, 428 aa, synthetic construct
  REGION 1..428: note = Synthetic
MTNTEKNKLITASLKATREKRKSQYCKTFKFKVDKSSLNAAQREHLIMFFNEAKWCYNYILNWSKDNPINDFDYKELKNITKLDKDNNIVPITISHISAAIKQSIIEKMKWSIRSLSALKSKDYKVGALKFKSEYNSIPLKQYSVTHKIEGSKFKIQGIKKPIRVNGLKQLSKYADIDYANANLLFDGIDYFIALTCYIDKNKIQHISTNKSIGIDFGCATSLTLSDTTKIDIDIKETERLKKLQRKLERQKKGSNNRNKTRLAIRKEYRHINNIKNDIANKVTHTLLTDFDVIITQDDNFNGWKDSDSKNEKIQHSVLGRIKSKLESSSQTVLLERWFPTTRQCTVCGTKIDIKQSERTFKCPKCGLTADRDVHAAQNMLYYYDTFKDASGTDVTSKPVSDCAFKLSYKKFFKHCSEAGRYNPLGLC

SEQ ID NO: 53 - protein, 464 aa, synthetic construct
  REGION 1..464: note = Synthetic
LTFSPAALIKKVVSQVSTMINKNTKIKQTLAETRKRRESQKCFVYKTKINRHKLNTVQKEQLERLFIEGKWFYNHAINFMETHKLSEVDTKVKTVTMLDKNKQPVEHELTALKSSYKQGIKDKIGDSLNALHQLKVNGYKVGKLKFKKEINCLNLKQFGVTHRIKSLHRVELQGFKQSFYVNGLKQFYSNPNAEITTAQLIRKNGDYYIHWTVYIDKKHIPSVEKNNENIGIDFGCATAFTLSDGRNIDFKLQETESMRKLHKKMARQKKDSKQYKKSCELLKKAYDKLGRKKDDFSYKLVNQLKHYNKVVIQDENLKAWHKGSHGKAVQHSVLGRVKNMLKQQANVHVLSRFAPTTKMCFNCGEIHKDIMLWDRVFECDCGVRKDRDVHAAQCMVWMAENGYENVNKKSKKKKSNTAGRGDVEKQTSTVKSYGGNTIADPCCLCGDSKFVSMKHETNVASARW

SEQ ID NO: 54 - protein, 422 aa, synthetic construct
  REGION 1..422: note = Synthetic
MTDTAKNIRIKESYAKTLAKRATQSCRVYTVKVQANKLNKQQREHLKMLFVEAKWMYNHVLNLSKRGDDIYGINYKDLGTVTHLDKDRNPIETELKHLSSQMRQAVIDGICGSIKGLAHAKAKGEKVGRLKFISEYTSINLKQASVSYKLVGKDKVKLQGLRKPIKVNGLGQVLSLGEYDLANAKLIQRSGDYYVAVTVYTAKKDNHEPKRMVGIDLGCKTCVTLSNGEKHECRVEETERIKELRRRISRSAKGSNNRHKLCLKLRKKEQELASKRDDFANKLCHMLDNYVVVMQDEQIAQWAKSRHGKAVSYGALGRVKDKLMKREDTIVLSKWCPTTKLCAECGERVPLKLSERTFVCPRCGHTHDRDVHAAENMLWFADHKIGVGRTVTLEEILKDIERLFQSDGTVNPQEAAKPSGWR

SEQ ID NO: 55 - protein, 473 aa, synthetic construct
  REGION 1..473: note = Synthetic
LLSKSSKPYESEEEFIELITEEHAKYLSDHNIEYSYIEDSFVEDASSTEDTLDLFHTDQKFFKSVWYYTKGVNNPDTEYVEYELKYLGSYVKTDIINKMCSNIKSLSTNKKNGKKVGHLRFVSEYNSLTYKKQGFGFDLNIGNATCRLQGCKKWFKVFGVEQFKEIRNADPNYEIATATLVRVSDGDFHLHMTVYVDKQKLVNYRRSKIEKKKYVRPGEEIIGIDFGCETSFTLSNGEKFTMLVEESERHKKLQQQLQRCKKGSNNYYKVKLRLRKSYTKMNNLKDELARGFVQYLRLHHDTIVMQDENLSGWLKGNHGNKVWHSVMGRVKELLMNEKCIKVVVLDRFIPTTKFCPHCGQMHKSLKLWDREYVCPNCGQSMDRDVHAAQNMVWIYKECLKHQIIPMDGREITRADFDRLVSMVFGSSAADRVEGMPDDCNGLETQCRCLQTVETLSVEKHEAQPVRVRKTSFA

SEQ ID NO: 56 - protein, 441 aa, synthetic construct
  REGION 1..441: note = Synthetic
MGMTEEQRLAKNASIKEAMKATHEKRKSQVCRVYMLKVKKNKLSARQKEDFKMLFVEAKWLYNDILNYGSVKGQSIFDYELGNVVEVKLPDGSFDGRNLDHIGSQMKQSVYTDMKSSIKALSKLKKKGIKVGRLKFKSEIRSVSLKQYGTTYKFHNDHRVKIQNIHGLVRVNGLDQIKDNVEFANAKLLNRADGYYLAVTTYTERKSYSNRPSADVGIDMGCHTSFTLSTGEEIDVKVKEPEHLKHQQRKLARQKKGSNSRRRTIHKIQKKHQRLVNRKNDKANKIVADLNKRFGLIYIQDENIKGWHKGGHGKAVQHSCLGRVKAKLKSQDNVYVVNRWEPTTQECINCGKKHTMPQNERTFKCDCGICIPRDIHSANRMVQEGRKLVPPEQREFMSSDWQTSILSYLGQGKSAGLTLEAHRLHAVGSSLQCGIGPRMEI

SEQ ID NO: 57 - protein, 428 aa, synthetic construct
  REGION 1..428: note = Synthetic
MTSAKNAAISQSLKKTREKRLSQDCRVFKIKIDASSLKKEQEEALKMQFVEAKWLVNEAIGSGDVFKYEAGKTVVHRDKDGNEVVSEIKHLGSQMKQAVVDELRSNVKTLSSLKKVGKKVGKLKFKKQVKSINLKQYGTTYKIVGKRKIKIQNAPGEIRVNGLDQILSHKGKPKYELANAKLLNTPRGFYLAITCYSKKKERKCNGEIGIDFGISTTITLSDGRKFNASVQETDRLKKLQRKLARQKKGSKRRYKTLCLIKQEYQKMSNRKNDIANKLVAEIMKYEDIYLQDENLTGWKIRFGKQVQHSVLGRIKAKLKPKARYVLSRWEPTTKLCVECGQLHKLTLADRTFTCDCGVPPEDRDIHAAKNMIAMSKNKILGLGRPELTLAETLLDLNASAVRAEVVEARRSVKGLRGVSRQEDATSLA

SEQ ID NO: 58 - protein, 319 aa, synthetic construct
  REGION 1..319: note = Synthetic
LCSAIKTLSTLKKRGQHIGRLKYKSEITAINLHRFGKNEISKNNKILLPKVGRVKVSGLEQIVNKGFEIANAKLLNRSDGYYLKVTTYQNKVEQIYKGDEIGIDLGVSTTVTLSDGRKFNASVEESERLKRLQRKFAKQVKGSNNRRKTLRKIKIEYQKLTNKKNDLANKIVHEIKQYKNIYMQDENLTGWKIRFGKTIQHSVLGRVKAKLVDQAYVLDRFVPTTKACYNCGQIHEIPLSQRTFTCDCDIVPEDRDVHAAKNMIALAKLGCKVKSVPVVCRDLSGNAKKSVELGTSTGAMAKVSSELGSRKTLKGVKTP

SEQ ID NO: 59 - protein, 429 aa, synthetic construct
  REGION 1..429: note = Synthetic
MTDETRKKKNENIAASRKETSLKRESQVCRVYQLKIDGSRLSKAQKEQLEMLFVEAKWFYNDILRYAETDPIKEYNASAKKVLVLKQGAYEEREIRYLGSQMKQSIKDSILTAIRVLATLKKNGHKVGKLKYKASFDCINLKQLGANSREGFVRGKNRVKIPAMKKLVVVRGLDQLTPDMEIANAKIIKRASGFYIKVTTYSNKKEETLLPEIGIDFGIKTHITTSEGKKYKAVVEESGHLKHRQRIVARRKKGSNNYVKAIKSLRREYERLSNKKNDLANKIVHELLQYEMVDMQDENLKGWHSGLFGKQVQHSVLGRIKAKLAESGRVTILARWLPTSKLCVCGHKKKELTLKDRIYHCDVCGYEEDRDVHAAKNMVRFAKALRSENCLPTERRAFDIIEKLVEEGEADRGNYSQVDLLLKQEGSTL

SEQ ID NO: 60 - protein, 428 aa, synthetic construct
  REGION 1..428: note = Synthetic
MEKKHNMSEEKNLKIKDTLCATKERRSHMDCRAISVKAQENRLSKAKLEKLYRCFLEGKWLYNAVVATDSLSLEGTSTVQVKVNNTFEEREIKNLSAQMKQSVVDSAKTNVCNLSKAKRKGLKVGKLRFKKECNEINLKQFGKTYKIKSRNKLSIEKIGVLVVNGLGQINLGEVEFANAKLIQKPSGFYIHLTVYSKKQSQQETSKEALGLDMGIKDQLTFSNGVKVNFYLEESEQLKGLMRKLSRQTKGSNQYKQTLARIKRIYEHLNNKKNDVVNKLNSVLKQNYIICFQDELLNQWKQKKSKRRFSFGRKIQRGILGRVKEKLKKNQSNVMLESSVPTTQTCPECGCLTKHSLDKRIYHCNHCGFECLDRDVHSASMMVLLSGYGTYRSLNTDAVSTEKMVGFLNNLSNLGVVVTTTDSMEADCL

SEQ ID NO: 61 - protein, 422 aa, synthetic construct
  REGION 1..422: note = Synthetic
MTRVDSTSKEKKEVKNKKISESIKTTKKKRKHQKCTCYELKINHRRLNSKQREALSMMFVEAKWLYNDVLNSGLTPPQYDDKTTVVRVKYPDGFRERQLQYLSAPMKQKLLSNMSSSIKTLNTLKKKGKKVGALKFISDYTSIGLKQYTKTHKFDFQRNRAHIQNIPGWVRVHGLKQIPHNAEIADARLLKRASGYYVKVTTFTGKKPANEQKPLTTVVGVDMGVAASLTLSNGYEFSAYVEEPERLKRLQRRLPRQSRSSNAYRKTRNQLGREYEKMGHRKDDAANKIVSEILKNDLVFFQDELIVQWKKRWGRKLHHGVLGRVKSKLNNAENAYMLDRSVATTQTCVCGKKNKIPLNQRIYSCGCGRELPRDVHSSQMMVVLGRALVPMGCREFTLVENVDSWGSSEFYEHSVKPEALTL

SEQ ID NO: 62 - protein, 436 aa, synthetic construct
  REGION 1..436: note = Synthetic
MAHHRGNNMDVKALSERNMLISKSMSETMIKRQSQECKVVTVKITNNKLNKTQKEALKMLFVEAKWIRNEMIGFGKENNIFDYEFKDSIQVMNKDKEFEMRERKYISAQQIQAVITEVKDNIKSLAKTKERGKRKIGSLKFTSEVKSINLKQYNATYKIKSETKIKVQGVPGDVKVKGLNQLPKNCDFANAKLLNKPDGYYIAITIYINKNELIDNFIPDTEIGIDMGVKDNITLSNGKKINVFIEETERLKNLQKKLHRQEKGSNNRYKTKKLIRKEYQKMGNRKEDISNKIVSELKSYETIYFQDENLVGWKNKKSLAHGSKKIQHSILGRVKSKLRNCDRAVMVDRYCPTTQTCVCGCKNKMTLDDRTYSCSECGYVNDRDTHSANMMILFGKESIGLEQTEFTPVEILASVAPLCGAVSRGRLNQEAASSLD

SEQ ID NO: 63 - protein, 466 aa, synthetic construct
  REGION 1..466: note = Synthetic
MEEDNIFKYKTLNTIYPHKRREVKRTIMSIEQHSQETKDRIKKAIKETRKRRSTMHCATYIVKVDPTFLKKNPTLDEKITRLFLEAKWFKNHILSHNLIFSDKPHSLKKAEVVMKDKSIETRDLKTLGSHMKQSIVSSMKDDIKGLSVLKKNGHKVGRLKPCKEVSSIGLKEHGNTYRVDIKNNRVHIQKVGWLRVNGVKQLPETVDFSTACLVHKPDGYYIHITAYSAKDTERVFVKDTYVGIDMGLKTSITLSDGEKFDFYVEEPDRLKKLRRKLSRQHKGSNNYVKTLNEIKKIEQHLTNKKKDMAYKLVSDLSHFEHVFFQDEMISSWKRKTCYVKGGKKIQYGILGRVKSLLKEKDWATMIGKHHATTQTCVCGAKNKHQLDERIYFCSHCGYSDDRDVHAAKNMVRFATHDVRYKIDSPQGLGIAPVEETTSAIHFNVIDIAQNSKWFLMKQETNSSLVS

SEQ ID NO: 64 - protein, 269 aa, synthetic construct
  REGION 1..269: note = Synthetic
VDFSNAKLLSKPDGYYINVTTYINKGDSPHRDFIPGSVIGLDFGLSTAITTSEGEHINLYVEETDRLKRLQKKKARQVKGSNNYKKTCSLIQKEYQKMSNKKKDMAYKLVSDLSHYEHVFFQDEMISNWKRKNGFARGGKKIQKGVLGRVKSLLKTKEWTTMLSRGDATTQTCVCGVRNKHQLDERTYFCSQCGYKDDRDIHAAKNMIRFGLSDKRYNTTQGLGEVPVEDITSVLHFNYLKGSISYHPLNQETYLLQVSGDTHSSSVSG

SEQ ID NO: 65 - protein, 469 aa, synthetic construct
  REGION 1..469: note = Synthetic
VSLVARRENKQKSPNDEARLAKNARIREAGKATRARRAKMECIVRKIKVDRSHLNNKQKEAIARLFLESKWLTNSCIANERFDIDYLKDLGDKVQVKTPAGMEEREFLVLGGQLAQSVIKGLKDNLRALSKLKSNGRKVGRLRYRRQVRMVNFPQYGNSHKINREKNRVKLAKIPGWMRVRGLDQLPAEAEFANCKLLDKPDGLFIAITCYTDKEPEDFTSGTSIGVDMGVKTHLTFSNGTKIDALVEESEHARGLRRKISRQKPGSNNRAKTMARLEKVLSKDANKREDIANKIVHELLKNEVVYYQDEPIKDWFKKQGRIKSGRRLQGSILGRVKEKLSRNPRAVMLDRYLATTATCICGHKTKHEPDKRTFVCSKCGYTDDRDIHAAKNMARLGQSQNASATERSSILADKHVRPVAPMDYTFIGKTGGVWMKQEAPTYSVIGVVHLSARPDVKSMGVALRKAGLI

SEQ ID NO: 66 - protein, 492 aa, synthetic construct
  REGION 1..492: note = Synthetic
MAPRKPHAKVMDDKARLAKNKRIAQSQKQTRKRRKSMDVVVRTVKVQRNKLSKTQLEALQRMFLEGKWLYNTAIAHDDFSENFRKQLANTAEVKLPSGDVEKRQLTVLGGQLQQGVLARIRDNIKGLAALKKKGKKVGKLGFISEMNSIPLKQFGRTHKIRGSKMKIANVPGWIRVRGLDQINLDTDECASAVLIRRNNDFFIALTIYKRKGEHASLATKKYKPGTTIGLDMGVGTQITFSDGTSVNSRIEESDRLRRLSRKLARQQKGSKTFEDTKKLIRDEHNKVASRRTDAANKVSSWILSHEHVFMQDENISSWRRRYSKARGSRAVQYGILGRVKAALVAHPRVTVLKRNVATTATCVCGVKTPHDVSKRVFSCPSCGYTDNRDVHAAKNMYRLAVPENIKENTTVERSQTPVEIGVSRFGKEPHGFLDKVRSVGEAGSGTVFSRSVVHDNYDESTSTSTSMSSQKRDTMGETFSNDIASQGAITNG

SEQ ID NO: 67 - protein, 434 aa, synthetic construct
  REGION 1..434: note = Synthetic
MTDDQRLAKNQRIKDTMNATRKRRSGMDCKVYSVKVSRSRLNDTQKESLTRLFLEAKWVRNALIGSGDFTRESLKKFRDEVPVHTPDGVVFRPVTVLGGQIAQSVLSELKSNLKQLSSLKKSGRKVGKLKFCTEVTSIDFVQYGNSWKLDVDNSTIKLANIPGWLKVHGLKQIPEGAECANAKLVKRPSGYYIHITTYIPKKKNHVQPGTTIGIDMGVKTGITLSDGSKINTAFEESERLRRLRRKLSRQKKGSNKYQKTWNVINQELEKLSHKRDDAANKLVHEIAKNEAIYFQDENISGWKNKKSKARGSKKIHHGILGRVKSRLKNLDNAVCLDRYLPTTQLCVCGKKNPHGLDKRIYSCPSCGYTEDRDVHAALNMIRIGRFLDDNNSTDLGQIRTPVEFPVRPATMLSCNMEAGTETVKREAAMSSASP

SEQ ID NO: 68 - protein, 469 aa, synthetic construct
  REGION 1..469: note = Synthetic
MSIIVNGKEYASEKNAQIALTRNNTRKRRETQVCKVYDLKIDMSKLTRKQEEALKGTFLEAKWIYNAALNTEKPTSYLPGKTVEVKNRDGDFETRDLQYIGSQVKQSVISGIGSSLSSLKAKKKKGYKVGKLKFTRRVKSVDLKQHGTTYRLFPENDKVRVQGVPGKMKVYGIHQISEHAELANAKLIQKSSGYYLKITTYLPKDDDVLVDDYVPGTVEGIDMGVATHITLSNGVKISTTVVEPPRLKRLQRKLDRQYKRAEKLQKSQGLNYLPFSQNYYDTLEELRKEYEKLDNKKDNLAKQIVSVIMKNEIVFFQDEMITSWKKWFGRELHHSVLGRVKALLKAHPRAVMIPQSEPTTQWCRHCEQKTKHDLNDRVYTCQYCEYSEDRDVHAADNMIWFGQSVLENNVPMERRELTPVLVDQYLKLFPLGCTIKYTERVIDLSELESRTPGTSPSLKQETNSSSVSW

SEQ ID NO: 69 - protein, 313 aa, synthetic construct
  REGION 1..313: note = Synthetic
VNFLEKKIRVQKIPGSFKVYGLEQLPSDAELANAKLIKKASGYFLKITTYTDKIEITGFTPGTAVGIDMGVATHITLSSGEKISTLITEPQRLKRLQRKLDRQYEQAKKQQSILGLSYVPFSQNYYNTLKELQKEHEKLNNKKDNLAKQIVALLLKNEYVFFQDENLTAWKIRSGRRLHHSVLGRVKALLKQHPRAFMVDKFTPTTQYCEHCDKKTKHSLKDRVYTCQYCEYSEDRDAHAADNMVFFGLLEHDIPMERRELTPVLIGQDTILNQLECVHYEYTERIPDLHEPVVTQGIVSSQKQETNLSSASW

SEQ ID NO: 70 - protein, 446 aa, synthetic construct
  REGION 1..446: note = Synthetic
MASNKTFSSEEARLAKNEQIAKSWAATRAKREQQDCRVYTLKLTLAKATRRQREALERVFLEAKWMRNSALAADDTLTYDWRSKTASVKVVTGVLEERELKHLGSQVRQSILEGLRRDMRSLAALKKRGKTIGKLKFAKQVNSIELKQHGTTYRIRGQKVSIQGLPGYYRIRGLDQLKDKDLANAKLIHKAGEYYLAVTTFQDKILEDKPEAMLGIDFGLKTHVTTSSGLEVNVLVQETERMRRLLRKLRRQISGSKNYTKTRLLIQREYGRLDQRKADQANKLVALLTSESIVCFQDDALSGWKTRRGFVRGGKTIQHSILGRVKAKLSGSANAIKLPRFLPTTKLCVCGVKNEALTLVDRVFECASCGYSRSRDLHAAENMIRFALISGQELPVAPVEGLSDWNKEAFELSYQQASMKQETDEAKKPENSRAPRGEASVSSAQM

SEQ ID NO: 71 - protein, 505 aa, synthetic construct
  REGION 1..505: note = Synthetic
MECSVVHGGGESSLGCLLVFGYSVVVVIDDGCGEALVGIGEEALKARNLKIKESRRATRERRKGQATGVVTLKVDRVKLTDAQVEAVEGQFREARWVYNEAVSSGDVFKYKPGRTVMVRLPDGSMERRDVRFLSAQEAQSIVELARNAVRGLAVMKSHGRRVGALKHVREVNAIPLKQYGNTYELRDPGDSHADGSYPYVHVLKVPGLMHVTGAGQLAAWDEVGPATLIRKGLGDYRLAVTVFMDKDRREAEREARRAAWEDAAPVLYRVGGVDAGLENAITESDGTRSGRIGIPEPAKLGHWQARLAKHKDAKGADGRGHSRSWWEAKERVDAIYDEVARARDARALEEYQRLTVKYSILFVQDEQIAPWARRDGFVRGGRTIQKGIIGRLWALFRHEANEAARLGRPSRVIVIDRCQPTTSWCRRCGRRTKHRPGLRVFHCAWCGFEEDRDVHAARNMVVLGLYPVTMEELRGDRSVPIGVYADLDTPEGAELRGVLDQLGWE

SEQ ID NO: 72 - protein, 420 aa, synthetic construct
  REGION 1..420: note = Synthetic
MTLDEVGIAERNKRIGESRKVTKLRRKHQVCRAFTCKIDYWKLKAEQREALSQLFLDAKRLYNDCVTSEDVFSYTPARVVNVRMKDGSFRQRELARIGVQTMQGVIQQAKDNIRGLSKLKEKGYKVGGLKPVKCFNSIPLKQPGRTYRLNGNYIHVERIPGVMHLTGVKQLKGWEIGPAKLLRKASGYYVAFSCFKDKMEYDEGKTYNPPPAIPIGGVDAGLKDEITESDGTKTTRRYPDTTKLRYWQRRMSKRDRNTNNWREANRQYRKEQDRLKAQRKHAAIEEARRLTGKYATLVIQDEQIHSWNKREGYARGGRKIHAGILGRLYATLKQRPNVIVLDKWQPTTSWCRYCGRRTPCPVSQRTFTCMYCGAQEDRDQHAALNMPVLQEQPLTHVDLRKPRDIPIGPYLGNARTRNAR

SEQ ID NO: 73 - protein, 450 aa, synthetic construct
  REGION 1..450: note = Synthetic
MLDVKARNNKIKASRKATKERRQTQSCRVVTCKIDQSKLSATQREALRRMFLEAKWFVNSIIASDDLFQYEIKGNTVPVRCKDERDEWILEDRPIIALSRQMEQGLLQECKDAIHAMKAKRDKAIKEGRKPPKLGRLKYRKEVAEIPLKQFGKTYRFAGPDTVRIQNVPGKLHLEGASRLNPDHDTDRSLTVRLDALLGFENKPVEYANAKLLHREDGYYLAVTTYEDTDQYEARRNARESILHHTPADGSKLGIDAGQTDQLTLSNGETVNEYVPESLRLKKAARQFARRSKYSSGWWDALHVLRLEYLKEARQRKALADQAFHDLHAKAATLYVQDEQISKWKRKTSQARGSRKIQHGILGRLYAKFKQDEHTIMLDQWQPTTAWCPRCGRRTKHPPGRETYRCAYCDYTARRDPHAAGNMIILSWRPLTRQELYQDRSIPVGPYGSI

SEQ ID NO: 74 - protein, 378 aa, synthetic construct
  REGION 1..378: note = Synthetic
LIANKSWNNGRQEAKAKSVLIKNHDGSWRTEEFKHLGSQVKQLLADQLVSNEKTLEKLEEKKLQKSGEFRFKRFVNSVPFIQPGVSFRLNGNKLQLQKFPGVLRVFGGKQLVGLEIASAKLVRKPDGFYFFVSCFENVGVGEFAVQSPVVPLGLDFGVRSHFSFSDGRESSVVFRESDRLRRLKRKRKRQVKGSKGYHKTRAAERREYQKLNRSKDAAAQKIVHDLTSDFQVFTQDDPFNQWKVKRGRNLQHALLGRVKQGIKRDPNSVVLPWWAPTTQFCPNCGILTKHPPKEKVFTCSECNYTSPRDKHAANNMILLGKLWLALKLGQELASTPVEGLSDKAQVSAVALLVPKEAGNDMEKKPGPAAEAALVSTTP

SEQ ID NO: 75 - protein, 406 aa, synthetic construct
  REGION 1..406: note = Synthetic
MSQSTKDKRKASRDATRARRANQTLKVRELKITRLNKTQQDRLKRMYLEAKWLRNTIINDGILNYKPSNTVQVKLPDGTIENRELTVLPAHVKQTIHTNLKNNIKTLSTLKRKGKRVGQIRYSARINTLEFPTGDIRVKGNKAHIPKLGWVNVRGTNQLGSEIANVRLVRRSSGYYLLVTSLTKKQSMLGPKREPLGLDFGIRTHVTISDGREWSLVVKEPESHKRLQRKLNRQTKHSNNYYRTLDKLNRSYERLSNKKNEAANQFVAELKKHELIVFQDENLSGWHKTKGFGRTVQHSAMGRVKAKLRTLPNVVMLDRFVPTTQHCPECGSLNKLPLSVRVYSCSCGYHAGRDVHAAQNMLVLHNSNHSPAERGGALVEDSTSDTNIVSIKSGLLKQETRRSLVV

SEQ ID NO: 76 - protein, 444 aa, synthetic construct
  REGION 1..444: note = Synthetic
MTVSLIGSPRKTSEEARLDKNRRIKESIKATKAKRKTQTCSTFDLKIVGNKLSSTQREALVRVFLEAKWLWNECIASGDPFSYKPRKNVLVKTKDGTMDEREYRVLGSQMKQSLVKTIRSNIKTLATLKEQGRKTGTVGFTSEVKSLGLPQPETTYRIRGQKARIQNIPGWVRVRGVRQLEGWEQAKAVLTSEADGWHLHVTCYMDKEEHRKRREAKRLAPVKNTIIGLDMGVKTAITCSDGTEYDVMVEETDRLKREQRKLNRKKKGSNNRQRNRMRIRRAYTKQQNRLNDAANKTAAELLRNETIFMQDEQVKAWHRRYGRKIQHSILGRVKNRLTRHAGQVVVLSKWEPTTQLCPVCGVKTRIPLERRIYKCADCGYTAPRDVKAAQTMVWLGQSKYSDKIPLERGEYKPVENTSESYVDNLRMFSMRSAKQETVTASASR

SEQ ID NO: 77 - protein, 435 aa, synthetic construct
  REGION 1..435: note = Synthetic
MSTQDNDAARLKKNAQIKSAGQKTRQRRKTQAAKTYELKIVSHKLSAKQQETLEQMFLQAKWYYNDVISHLEDHNLNDYDTKVKNVAVRMGSESDDFEERQLDVLSSKMKQGFIEQVRDSLSALKALKSKGHKVGRLGYAKEVKSIPLNQYGNTHKLVENSPKIRIVKLGNVRIRGLHQIPQDAEISVANLTKKADGYYVHLTVYVPLNVDVNWENRSDIGLDFNIGDTLVASDGRKFKARFEASDRLKQLQRKLSRQKKGSKNYHKTLKKINKEHQNTSNKKNDLANKIVRELLDSSGLIYIQDEMIKNWHSGLFGKQVQVSILGRLKSKLVKDPRVCVIDRSCATTQLCPECGSLNRHSLDKRVYHCPCGYTQDRDIHSAGNMLVFAENEDNIIKKFGAGRTSTPVERTPSASETLESDVSCREEAGNPYLCR

SEQ ID NO: 78 - protein, 244 aa, synthetic construct
  REGION 1..244: note = Synthetic
LFRSSLFLQGGVIHIPLNVDLNWEDRNDIGLDFNIGDTVVTSDGRKFKARFEVSDRLKQLQRKLSRQEKGSKNYLKTLKKISKEYQNTSNKKNDMANKIVRELLDSSGLIYMQNEMVKNWHSGLFGKQVQVSILGRLKSKLVKHSRVCVIDRSCATTQLCPECGLLNNHSLDQRTYHCSCGYVKDRDIHSAGNMLVFAENEDNIVKNFGVGRTSTTVEWSSSASETSGSDVSCREEAENSYLYR

SEQ ID NO: 79 - protein, 426 aa, synthetic construct
  REGION 1..426: note = Synthetic
METVLPVKPMKTYSCEKNRHIAEKGKLTKDRRSRLQAKTIELGIDKTYAKPHAEKLNLLFLQAKWLTNDIIGHLRDGDLKSWDDKKKNVQVRMGKNSEKYEFRDLTILSSKNKQNLRDRVKDNLSSLHALKNNGHKVGTLEYAKEVTSIPYNQFRNDFDVDLEARKIKIQKVGWLKVHGLSQLPQDADIATGKLLKTPRGFVFHLTFYTSKEEYTFTPGSIVGIDFGVKTFLTLSDGMEYQNSIPITPRLKNLQRKLSRQKKGSNNYIKTLCSIQKCYHDISHQKDDIANKLVNFLLNTYEIIVIQDESLKAWKRLWGKKLHHSILGRVKKKLKNNPRVIVLSKWVPTTQYCPVCERLNKHSLDKRVYSCGCGYSAPRDVHAAENMIRMAVLHPDLRMTNRDMDLSWVKDSRLDLFTTPSAGRAGV

SEQ ID NO: 80 - protein, 390 aa, synthetic construct
  REGION 1..390: note = Synthetic
MLYVYKVRKRGEKMKVTRSYEIKLKPNKSQMFQLNNYFYEAKILYNYLLNCSNIFAVHSCKIKHVFKYDKDRNKINVVLSYLPSKLKQNVHRGMMDAIKSLSALKRKGKTVGRLKFKSEITTIDIDNQSYFVVDKYHIKLLGFRRKKIRCLGLHQLDDSIIKFRNAKLIKRDNEFYLKICVLKEVDILQSLRQDDVSQTEQFDQNIGTDFGIADTITLSNGQKLNCKIEETARLKKLQKKFARSKLLNSKRTNNQQKLLVQIHKEYRKILNRKKDFTNKLIHRLDSNYTYIVFQDEQIRGWKNLKSCRCTIQHSCLGTIKQRLISKHQEQPNRYIMLDRWTPTTQSCPKCHKKNPHSLDKRIYQCSCGYTEDRDVHAAKSMLLFANLSPV

SEQ ID NO: 81 - protein, 392 aa, synthetic construct
  REGION 1..392: note = Synthetic
MIQIRSYKLKLKPNKHQLQKLNNYFYEAKCLYNYVLSQEDVFKFDTKIKNITKLDKDRNKVEVILNNIPAKLRQNIVHRLQDNIKNLSKSKKKGNKVGRLKFKSEINCIDLDNQCFKIIINKLQILGFSKSKIKLKGLNQLKDIIKTRNAWLIKEANNYYISICCDVEVKSHIKTNKHIGIDMGIKDNVTLSNGEKFNCSIGESERIKKFQRKLAKSKKGSKNRYKIKLKLRKAYRKITNQKKDFVNKLVHRLDQEFDLIVWQDELINKWHKGWFGKQVQYSCLGMFKQKLEQRMKEETNRFIELDSKYPTTKLCPSCGCLNNISLADRIYKCDCGYTEDRDIHSAKNMILIGQGLSDFKLVENKTSTSKKFLEASYDSKKQEGIHLNFYIK

SEQ ID NO: 82 - protein, 442 aa, synthetic construct
  REGION 1..442: note = Synthetic
MARKQLTDTEREQIRKSLAETRERRKTQIIRIFELKVNCHQTKPETFRKFNVFFKQAKWIRNDMIALSKHNEERNIDIFDYNYLEHKNIKHFDKDKNEVYDNITLPVYLHRGMVANVKQDIVNLSKAKKKGIKIGMLKFKSECNSIPILSGGVKIIDNSHITIPGFKNLKVYGLNQILNLNNYELADARIVKKASGIYIHVSVCLNKENYKNNKLYKEVGLDFGIKDNITTSDGEKFNCNVRESEYLNYLQKQLHRKQKDSKRYWKLRNQIRKEYEHLTNKKVDATNKLIHYLIANYNTVYFQDEMIFKWKKKKHSKKNGKKCGNSFGRQVQCSYLGRVKAKLVSMEGTKSFKISKSHPTTKLCTACGCLNTLSLADRIFRCACGYAEDRDIHAAKNVKFIGTIKRTECLEQASVETLSSTVKPAMVNGKVGRRNEKEDSGF

SEQ ID NO: 83 - protein, 284 aa, synthetic construct
  REGION 1..284: note = Synthetic
MLKIVNSKTVSIPFFRKLKVYGLEQFINIPGFEIANANLIKKASGIYIKVSVCIPKSQFNRKPTGKEVGLDFGIKDNIITSDGEKFNCSVQETDYLKFLQRKLSKKQKGSKRYYRCLNQLQKEHEHLTNKKNDDSNKLISYLLKNYDVIYFQDEQISKWRKFCPGFARNIQHSYLGRVKSKLVMLEKSGRSFKISRSLPTTKYCPQCGNLNKEITLADRIYNCSCGYSYDRDVHAAKNVKLFGSTKRAECLEQASVETLASTALNLCSMPQVKSMKRKQEADSL

SEQ ID NO: 84 - protein, 362 aa, synthetic construct
  REGION 1..362: note = Synthetic
MYRTYQLKIKNTDKEYFSSLFRESKWYYNTILSSNDVFKFDTKSTTVTPALDFQTETVFLSSQMRQEIKKKIISSIKGLSKRKQKSKVGKLKFKSYVNSVNLKNQTFSFIKNKVRFQGNKKKYKIFGLPQLPEDSKIVSGILHRNSKGLYLLVTVEIQDKETNTPNLELGVDFGIKDSLTFSDGTKLNTNFCTDRLRKLQRDLSRKTKNSKNYRKAQSKYRKEHQLLENKKKDFTNKLKNKLGNYKIYFQDEMITSWKMRFGKQIHNGILGRVKLMLKQNTNNLMIPHSAPSTKLCPKCGVLNTLKLSDRVYNCECGYSKDRDIHAAQNMILIGSGRTYVEKKSDLFEVLKNIDCKHFSLKQ

SEQ ID NO: 85 - protein, 568 aa, synthetic construct
  REGION 1..568: note = Synthetic
MIKQDKPSDRIQTRKETKSRRSSMVIKVLSFNIQKNKLSKDKKFYLKTLFLEAKYYYNYLIYLSQQSVTDNYGNTVYPYNLFEFNTKSNQILVYENSSNSYLPYELKFLSSQVKQELLKKIQSSIKSLSKAKTKGRKIGHLKFKSFVNLPLKQFNNSFYLSDNGKKLSLQGNKKSSFHLVRNKNLTQLSKELNLNFNGQISLKKLIDLNIIEIANAELASSYKKDTYFFNLTVYFNPQYLKKANLFQGTKLSQEDTSLISQLNLGLDAGIASEQTINIGETFSSISINSRNPVNKAQSNKLKKLKHYQRKLNRHIAKSKKHKKLNKDNNKNIIRNNDKGFYTGKFKELKQQINSIQDNLNNHKTDSIAKITSIYDLFAQITFQDEMVKSWHKNKKMKFSSPIQKGILGKVYAKLKNNYDSENNQTINNGKTHYKYRKLSQSLRTTKTCVCGNVNKDITLKDRVYVCSQCGYVNDRDTHSSYIINHTLNHIEYQQEEVLGCGMQPKDWGLNKDLMLNSNLGQTITSAKTEQVFNILSSKLKSNNLSIKLNNYITLIDKPNQEASDFRPR

SEQ ID NO: 86 - protein, 450 aa, synthetic construct
  REGION 1..450: note = Synthetic
LIKEEARLAKNQAIAEAQKATRAKRSMQICKSREIKIQSNKLNKLEANHLRLLFLEAKWFYNHLLADHRRICRESVKLKSVPVKLPDGSYDERELAHISSQMKQSIIDNMVSSFKALAALKKRGVQNPGKLKFKSELKTIELSQYGITYRIDFNHKLLYIQGIRSGLKVNGLEQIIKLKEKYGDVDITSAKLINRPDGIFLKIVCYVMDNKKRIPEVVGIDMGLGKHITMSNNLGFRFKVDETKMLTSLHSSDLQQKLSRKKGAQKGEKKSKNFKKVRKELSKEYQKIVNKRTNAINHIVSLIDEYEFIAMQDEQITGWVKKKRKKRNKEIYHTGMGAIKSRLSNLESSRVDVLDKFKPTTQSCSKCHTLNQISETTRVYHCQACGLTIDRDKNSTLDMIIMSKFSDKPVSTEHRNLSPRHYLRKKIKNMRKIPYLKVSSIKEAQLLVAG

SEQ ID NO: 87 - protein, 437 aa, synthetic construct
  REGION 1..437: note = Synthetic
LSTWTFLDYEFEDYASIYKSYRQSASLRETKAKRKEQRCRVYELKVNNAKLNSTQRNHLDMIFVEAKWIYNDIIKDVSNKATDAYVRSLKEVAVRYPDGFSYQTISHISSQMKQSIATGVISSLKSLAKLKANGQEVGELKFVSEYRSVDLKQYGNTYRIDFAKKTIKLQGLGKPLKVFGLEQIACNADIANAKLVKRFGEYYFYITTYSKDERVRKNEVLGLDFGISENLIMSNNMELTYKTPISPRTIKLQQSLSRKIGAKKGEKKSKKYLKNKRALTKSHYTDRMRRRDANNKIFHFIDGYNKIAMQDEQIKGWMGSKEANKAIQYSAMGTIKSKLSGLESSRIEVLDKFKATTKTCSCCGAIRRMSKKDRVYKCLKCGLTIDRNLNSTFNMINMSRFATEYSKTMPVDSSNKDFINLSNIEGLEIRILSREAR

SEQ ID NO: 88 - protein, 444 aa, synthetic construct
  REGION 1..444: note = Synthetic
LSINPITNNNELSKNTQIKATLKATKERRSLKRCRTINLKIQKNKLNKQQQEHLSMLFVEAKWIYNHILNDIKNRANDSYVKSLKEIEVPYQDKLIIKPLKFISSQMKQAVATQVKSNLSVLSLLKKKGHKVGKLKFKSFINSINLKQYKITHRIDFSTNKISIQGIKKDIKVNGLNQIKEFASKFSDLEIANAKLLKINDDYYLNLTIYHSDIEKKNEILGIDMGIKEQITLSNGVGFSYNIKESKQLKKLQKRLSKKKGSKKNEKKSSNFYKTLTKLKKEYKKVSNKRTNINNHIFSLIENYKFISMQDEMIKSWHQNKLFGKKIQYSGLGAIKSKVKNLESHRINILSKSLPTTKACSNCGSIKTMTLNDRTYTCDECNLKIPRDLNSTFNMIKLSKFSAEHRKTMPLEDKSTALINLRNVDGLSVRLYPLNEEARRFIYE

SEQ ID NO: 89 - protein, 439 aa, synthetic construct
  REGION 1..439: note = Synthetic
MVACSKAKRLQIKATRQATRERRKSQTIKTYTLKVNNQKLSKQQQEYLHKIFIEAKWFYNFLLQNDISMKYNDVKDILKQDIVKIKKKDVFEDRKLEYLSSSLKRQLHQRICNSIKALSVLKAKHIQSVGRLKFTPQINSIDYPQYKITWRFAGQNKIQIQGCKKAFRVFGYSQLKNVKEFSNLKLVRKADGYYFQITSMEDKIQRKPTNQAIGLDFGIKDTITTSNGDKYKFDFPETKRLKRLQRHESRKLLDKNNKKSKNRLKLRNKINIEFQKINNRKKDATNKLVSKLVKENDIICLQDELVSQWHKGIFGRSVQHSNLGAIKSKLKDLQSTHDIRVIKSEIATTKKCFCGRKNAVSLNDRVFKCEKCGFEYDRDIKSAIYILVCGLQQQSTSSGTGDYTCGENVRIIVDGDVKVKINNNQFSMKQEAQSSLAAG

SEQ ID NO: 90 - protein, 424 aa, synthetic construct
  REGION 1..424: note = Synthetic
MKAGFKSSDEKKRKIKETLQLTREKRKSQAVKVYALKIDESHLNIPQKLWFEKIFLEAKWFFNYAIGRDDLFSLDLKIKNVLCKNKEGNDEWRKLEFLSSQMKLGLHSRIIDSIKGLSVLKKKGHQVGRIKHTKNIDSIPLPQFKNTWNIQNGRIRIQGLKKTLPVTGLDQIPENAEFANAVLFKKASGYYIHVTAYLPKQERVKTGRDVGLDFGIKDNIVTSDGEKFNIKIPESKKLKNLQKRFSKKAKGSKQRFKVQKQVKREYEKIGNQKKDKVNKIVSHLIKEYDIIYMQDEMIKQWHSGLFGKQVQHSALGAIKARLKQLESVRTISRSFPTTKMCYNCGLINQISLTERTYKCSCGLEEDRDIKAAKTILKVGRLKFHCAERTLTPPEELTATQIESNFELSKLISMKEEACCSLDNR

SEQ ID NO: 91 - protein, 425 aa, synthetic construct
  REGION 1..425: note = Synthetic
VDKNASLVAKRDKIKQSLKATKAKRKLQSCFVRELKINTSHLSKENYNNLNLLFIEAKWLRNAMLSSNNIAKFNLSKSLIEVSGFDKHRNPEMKPIRMLSSQMKQAIQTQLKNDIKSLSTKKKKGFNVGALRYVSEVNSIDLKQYNRTWSFKDDFKKISIQGIKTSLKVHGIKQFKFNELNYDFANAKLIKKATGFYLKITYYLYKNELSAHNQELKSNVGLDFGIKNNITTSDGESFNILIKESESLKKAQRAFSKTQKGSNNRYKIRLHMKKLHEKITNQRTDKANKIVSYLQRNYNTIFLQDENIAGWHKGAYGTTIQHSALGTIKSKLMNLEQSMIINRAAKSTKQCFCGNEINLGLNERTFHCPFCGYKEDRDIKAAKLILLWGETKQNIINKKAISFFNLNYEKSLLRIAETIKTELNQ

SEQ ID NO: 92 - protein, 431 aa, synthetic construct
  REGION 1..431: note = Synthetic
MLSKNERIRQSNIETRQRRATQRCLVFSFKINEKKLSKSDFKKLEFMFVQARWLYNYILGLENIKACDTKNKTIYSYDKDKNKVERTLNLNSKVIQGIKQGIEYSLKTLLTTKKKGKKVGKLKFKSDYNSIELNQYKNTHEIKEKGIRVCGFKRPLRIFGLKQIKDKKYEFANAKLVKKPTGFYIKLTCFENLNHDRINQVTQNQKSDVGLDFGIKTNITTSDNEKFDISIGESERLKGLQKKFSRQIKGSNNRNKTLRKMKVEYERLNNKKKDFGNKLVNYLCTKYHTVYMQDEMISNWKKTKRSKKSNKKLRFLSFGKEIQYSCLGYIKSKLSKQPNVVMIDRSYHTTKMCYKCGNLHQDITLNDRIFTCPHCGYSEERDLKAAKTILFIGQCKNTYVPVERRNTDVEKMSDFLVSYETKKQSSVKHRS

SEQ ID NO: 93 - protein, 431 aa, synthetic construct
  REGION 1..431: note = Synthetic
MDKSWKLKIRNGIRLTREKRKVQICKVYELKVDESRLNKIQKETLKMLFIEAKWLYNYWLSTDKIFEQDCKNKEVIVLNKDKNKVKKQLKFLSCSYRQQILQHMKQSIYILAKQKKKGLKIGPLKFKKDFKCLELTKHALQKNGGTYLIVGKNRLKILGIKKSLIVNGLKNIPDGVEFANAKLIKKPSGYYIKVTTYSYPKIVDQKGEIENKEKKDVGIDFGIKNMITTSEGETFNCSIGETERLKRLQRKQSRQQKGSNNRRKTNVLLQKEYEKISNKKNDAANKIVHKLLTQYSRIYIQNDNFANWNKKLYNTGIQHSILGRIKAKLKESKQVGIIDQFIPTTKMCYKCGIINNEMTLNDRIFKCVNCDHEEDRDIKAAKTILMIGKINYTNVSVPTMNREFKPVEVSCILEKSSNQEDMKEISYYHRR

SEQ ID NO: 94 - protein, 431 aa, synthetic construct
  REGION 1..431: note = Synthetic
VDQSLKNKISKTRNETRERRSHLICKTYCLKIDYSRLNKKQKESLRMMFVEAKWLCNHWINEDKIFEANYKQKKVIVKNRHKEFEERTLKFLPAKCKQSILQSMRESIYALSRSKKCGHKVGRLKFKKEFNTLIFNQYGTIGTHKIYDKNKIKILGIRKLVIIKGLDQLPKNCEFGMAFLRNKPSGYYVHITTYSRKETTKEEKKKFKEIGIDFGIKEMVTTSDGEIFDNVSIQEPEHLKRLQQKLNRSQKGSKNRYKIKLLIQREYEKLNNKKEDISNKVVHQLISQYEKIYIQDDNFNGWKTKGKHWSKKIHHSCLGRVKQKLISKGAIVINRFLPSTKMCYKCGNSYSVGLNERIFKCSNCGLIEQRDVKAAKTILMFGNGSLQIIKNRKVPMEHRCQPVETKTSVSKKLFGISSVDETGRSFKKPKD

SEQ ID NO: 95 - protein, 392 aa, synthetic construct
  REGION 1..392: note = Synthetic
MFRNKSAEKEERRKSQRVISRELKVNNWQTSKTKMKELNYMFVQAKWITNDMIANENIMEYKYNEHKTVKHFDKDKNELFTEITLGAAIHQELCQKVQQDIKNLSKKKNKSKVGKLKFKSEVNCIPLRTGSFRLVNSRNIRIPGFKKITVRGIDNIPENAEFATAKLMKKASGIYIVITCYVEKEKKNISKEIGVDFGVKNTITTSEGKIYNCQVGESERLKRLSKKFNHSQKGSSSRNKLYKLLQKEYEHITNIRNDKGNKIYHELSRDTFVYYQDDNFNGWKSFNMGRKVQYGVLGRVKHHLSNSEYALDVKRFCATTKVCSNCGTVKPEKLGLDVRTFECDECGAKLDRDVNAAINIKLLGQHKRPESGIDFEKRDNPLASDSSDAKIA

SEQ ID NO: 96 - protein, 439 aa, synthetic construct
  REGION 1..439: note = Synthetic
MTTIQDKKTSIKNSLNETRLLRENQYCYVRELKIDQSHLNNKQLQHLNRMFLESKWLYNSIIQFHSEFTISKLNQYDTKIKSVLVKNKDGIYESRNIDNLSSQIKQGIYETFKMSLSSLKSLKQKGKKVGKLKFKSEYNSIYLKQYGNTHKIKNKDGKLSFHIVGFNKPIKVHGLEQIKDLLHTENLNNKNIASAKLIKKPNGFYIHLVCFKSKPNLNNNNDIPIKQPVGLDFGIKTSITTSDGEKFNIMIEETRSIKRASRRVNKSQKGSNNRKKRRLKLQVAYEKLTNRKKDLVNKIVSKLSNNYSVISIQDENIKGWHHGWFGKQVQHSSLGKLKARLKNLSNNQCHIVPRFYPTTKLCPNCGNISSTISLSDRIYSCDCGYSFDRDIHAARNILNHYVSSLCTERTLTCGEMATSGGLNLFNSLSAIVEPRSQSL

SEQ ID NO: 97 - protein, 420 aa, synthetic construct
  REGION 1..420: note = Synthetic
MTSLEAKKESLKRRKQLKLKVFTLKIDNKSIKENELYFKMLFLEARWLYNHLLSQEDIFKINVTDVKSVQVKVKDGFDEREIKYLSCAMKQASCDKLKDNIKALSKAKKKGLKIGKLNFKSEINTIIIKNFKVYFKAKNRKNKTRLPRLKNLVKVYGLSQLNGALEIGCAYLVRKPSGFYLKVTTYWPKENTQPKKSLGIDFNISNTLVISNGQQIEKISIKESKRLKKLQRKRDRKVKGSNNRFKHNKLIAREHEKIFNKKEDISNKIVNKLKNYNVVIQDDNLRNWKQNKSYSKTIQHSILGRIKSRLISLETTKVINQFERTTNTCFSCGNKLNLSLGDRVFTCPECGFTHNRDLNAAKNIMKIGLEQSEFTPLESYIDFGPVKGIEVKTLKKENLEKDKSSHSIECDIVHVVRLHV

SEQ ID NO: 98 - protein, 426 aa, synthetic construct
  REGION 1..426: note = Synthetic
MEKVLTQRAKARKETKKRRSSMKINVVDFKVDESKLSFTKSNLIDSMFQQAKYLSNAMVASGDFFFFNTKVQEVPVSWEDTDGTKHTEIRSIEDLPAQCKQDIRVGFISNLKTLATLKERGYKVGKIDFRKEVKMLSFNQYHASWRFAEGVDLQKHSKNCIKLAGIGFIYCTGFDNKSIQDIREWGPAKLVRKPDGLHILCTGYETKRVKTAPKGSSVGIDMGLKDAIVLSTGEKINFKYNEDKKGLRKAHQRLSAKKLGSKNYIKQKKKRQKRFMKFKNRKADVTNKFVSGLQRKYETICIQDESLSQWQQKDHGKKIQQGVLGRIKSRLSQSNTTRVVNKWCPTTKLCPKCGCVNATNDVRDRTYVCDSCGFTDDRDVKSAKIIRILGLQKDFLKSLPAERREYTPVESLTSVTAFFETLYASQ

SEQ ID NO: 99 - protein, 411 aa, synthetic construct
  REGION 1..411: note = Synthetic
MDVKCFETKIIENKLKNNQYNKLKEIYKQAKYLANDIIGSDDIFAYDTKIKQVKVQWTDKDGVEQSEFRTIEDLNAQVKQSILTGIITDICNLAKAKKKGLKIGKLKFKKEIVLLNFKQYKGNWYIKSGNNQLHLAGLGKIKVSGLDQLPKNVTEFGPAKLIRKPSGYYVQITCYSNKPELPQIKEEINSTNIIGIDMGIKDHIVLSNGEKYNFNYDIKKIQKSHQELSRKVKGSKNRYKQLWRLKKKYEELMNKKVNDTNQFVSDLTKRFKLICVQDENIRGWKSGLFGKQVHGSILGRIKSKLNKLSTTLIVPMNKPTTKLCPKCEKLNILSLSDRTYECSCGFKEDRDIKSARTIVCMALNNYVPTERREFTPVEILTSGLTDKYELLFSEAKLELLKQEAHESLAHG

SEQ ID NO: 100 - protein, 423 aa, synthetic construct
  REGION 1..423: note = Synthetic
MNDRIKAKQETSLRRKQLKPVCISAKIQENKLSSERQTRLGDMFRHAKYFYNAMINSEDIFKFDYKTKEVEVKWKEKDNEKSEIRPIFLASQIKQGLQDRTKDSVKGLKQRRKNGGKTGKLKCKREVNSIPLKQYGVTYKIKDKKIHIAGMGFMSVNGLDQLKDLNVKEFGAGKLVRNATGYYVQITCYLDKQDKNKPDNEENFPAVGIDMGIKDDVTLSNGDKFQFKFDYSKIKREAKRLSRKKIDGKNWFKQKLKLKKQYEKVTNQKEDSSNKFVSYLGKNFGYIAVQDENVKGWQEKFYGSKIAHGVLGRIKSKLMKLNTIQVVNRYRPTTQVCPVCTKLNEIGLEERHYQCSCGYSEDRDTKSAQCVLLYSIGQLPTEHRKVTPLEFLTAEATEYRKKSLSNFKSVTMKREAPTIYGCG

SEQ ID NO: 101 - protein, 418 aa, synthetic construct
  REGION 1..418: note = Synthetic
MSKSQKIKNTLAATKLRRQNQKCKVFELKIDESKLSTEKRKKLNDCFIQAKWIYNNLISQNDEVSFHSSQKEIAVKVFNPETQECDKTEIRKLTIGSQVKQAICDRFVQNIVNLSKAKAKGRKIGRLKFKKDVFSVPLKQFGTTYKILDNQTISIQCVGKLRARGLGQIKNAEIANAHLTKDATGFYVQVTCFEEKTKAETSGAIGIDFGIKDSIALSDGRKFSWNFEIPAKLKRKQKKLSRKKRGSKNYVKLSKKIRKNYKQHCNKKDDAANKFVSSLKGYSKVVMQDEAIHGWHAGLFGKQVQQSILGRIKSRINQLETSVVIDRWLPTTKISPITGKKIKIGLDERMFIDGNFTEDRDIKSAKTILYFGLYNPNLTAKELSGLPPEEITAVFKQFYCFESKLLPLNEEASPFKAG

SEQ ID NO: 102 - protein, 455 aa, synthetic construct
  REGION 1..455: note = Synthetic
MKKEEKNLKIKTNIKDTISRHSKMTCKTFEVKVVSNKLNNLQKEQINQLFKEAKWFRNAYITNNEINAKAKTVLVKVGKNFEERKLELLGSQIKQSIIKEVETERKALFTKKKKGMKVGKLKCKPFCNAIELKQFGKTYRIKNDYINVQNIKKGIRIKGLKQIPEEVDICNAKFVRRASGLYFYITCYVPKRKEESKHQSIGIDFGIKNNLTLSNGEKFNICVKESKATKILSTKINKALIKNGRTKSKNHYKRVSKLRRSYEKENRKKRDLVNKIVSYILSYDFIAIQDEMIHNWQSSVFGKEIQHSNIGLIKAKLRKNSKVYIVDKSFPSTQICPVCGKLNKHTLKDRNYCCKYCGYYHKNRDEKAAQSILDYAISSMERRSRSLVENTSSTTNMSLDSKKTSMKQEAHYLGSSHKIFEGRKIMTYQNSENVPATKSQIRNVIDELNLLEAAL

SEQ ID NO: 103 - protein, 388 aa, synthetic construct
  REGION 1..388: note = Synthetic
MTCKAFELKSLSLSFLNIKKEMLTKFFRQANYIYNSLVADSKKFKTTDKEITILCGDHYEIRRLDLGSGIKQGIRDKFITNCKSLKGKKDSGDKIGKLKFKSYTNAIPLRQYKNTYNINFDKNTIRIQCIKQAFKVRGLKQIPENAEICNAELIRKASGYYIHVVIFVPKENKQANSRQIGLDFGIKSNVTSSNGEKYDVKVPESKGTKLASRKTNHKKKGSKNRQKAQQKLRIAYEKDTNRKLDKAKKLVSYLDSYDLIAFQDENIKDWHKEFGKVVQHSAMGFIKAVLKTKANSIMISRYFPSTQICSVCSKLTPHSLNKRDYDCSFCGYHHDDRDVKAAQTILDYVNVSLGRRANSLVELKTSALKDFSSSISLDYEAGRPYSLE

SEQ ID NO: 104 - protein, 422 aa, synthetic construct
  REGION 1..422: note = Synthetic
VGKSEKRKSTLEATMERRKTQDYKVFTCKIDYSHLSKEKKEYLTRLFLEAKWLRNYIIARNDIFNETDKHDFVIVFNKDGEEEKRDLMCLSSQMKQGILNQIKDDIFGLSASKKKGRNVGKLKFKSRVNSINLQQFKQTYRIVGKNHIMLQCFKKRFRVRGLKQIPVGAEIANAKLLRKPSGYYIAITCFVPKVERIKAGKEIGFDFGIGTHITDTEGKKNNWKFQETTRHKRLQRKVNKTYKSGKKSSKNREYRKHLCRLEHEKLSNRKKDTIKKFVLNIKKNYDFIGVQDENIAAWKSSRMKGWGRIVHYSIMGGIIRELKKLSQTHVVDKWERTTQECLICGKKTKHGLNERVFVCPHCGYTEDRDIHSARLVLKKAKEISTEYRNVMPVESESSTYESEMADEQDSSMKQEAPSFRMG

SEQ ID NO: 105 - protein, 397 aa, synthetic construct
  REGION 1..397: note = Synthetic
MIKNKRLEKRKQTQERHSKMVCKVFQCKLTKLDKKKEEYLHRLFLEAKYFYNDIIAADDIYKYDYRNTLCVTKNFVSKTYECRHLFILSSQMRQGILDRLKSNVKMLSTKKKKGREDEVGKLKFKSEVNSIPLQQLDATYKLLNNNISLQGCKYIFKIKGLKQIPKNAEICNATLVKKPSGYYIYITTYVEKDYTYKRVKRGNIGIDLGLRTTATDSFGNEYSWLFEETDVLKKRQAKLANQKYSSKNWFKTLKLIKKEYEKIKNRKEDVANKFINILKKYELVAYQNDNIAGWAKSNMKGWGRKIQHSIIGRIKSKIKKLVTSVEVDRWTATTKICPCCNIKNDIKLQNEENLYYECSCGYKEKRDVHSAINILNIALKATGMDYACGLDPRSQSL

SEQ ID NO: 106 - protein, 436 aa, synthetic construct
  REGION 1..436: note = Synthetic
MITKSEQIKQSLNATRERRKSQTCKTYELKFDKSKMSFKKEHFFKMLFVEAKWLYNDILSTDDVFNYDDKAKVTHNLDKNKQPVEHKLTCLSSQMKQSLVNRTKDSIKALSKSKAKGNKAGKLKFKSSVSSIPLKQFGRTYRINDDKTISIQGLRKNFKVHGLSQIPADAEFANATLVKRYNDYYLYVTVYQKIEKRILSGEVGLDFGIKNSITTSDGDVYNYNFKETKSIKKAQKSLSRKKLGSQNRYKQKDIVAKRHGKLNNIKKDAKNKFVSKLKDKKLIAVQNEQLSKWHSDRKFSRKVQHDIMGVIISDLKKLSQTIIIDKFEPTTKKCFVCNEVADITLSDRIFHCQNCNFVMDRDVKSAIYILLKGIQISTGRRNIMPVEYESSVFNRSVKGKTRTLKQEATDFWKIYFQKESKKATNFWLTPEATCFS

SEQ ID NO: 107 - protein, 423 aa, synthetic construct
  REGION 1..423: note = Synthetic
MNEETRITKNENIKLSILETQKRREKQVCKTYTCKIDKSHLSKDKLSFLRKLFIEAKWLYNYQLSLDDIFDIPDNIKEVTILNKDKLPEQRELKTLSSQMIQELIQRTKASIYALSQLKALGFKAGKLKYKSFIGSIPLKQYNNTYKIIDDKYIKIQGYKKYFKVRGLKQIPKNAEYTRATLVNRLGDFYLLITCYLPKLPKELTGSVIGLDFGIKDNITTSNGEKYNFSFPETRQIKKASRKVNKAKLGSNNRHKKKKKLSKTYQNLTNQKEDAKNKIVSELVKENDKICIQDENIAAWKSSKMKGWGKRIQHSIMGGIISDLKKRSETTVIDKWYPSTKLCPTCGVLNVLRLSDRIYKCDCGYSEDRDIHSAKNILAEGLRISTGRRNLMPVEKFASILIYLNWFIISIQASSMKQEAMRL

SEQ ID NO: 108 - protein, 472 aa, synthetic construct
  REGION 1..472: note = Synthetic
MLESCLQEPSTRIYGTDGKNREVFHPSRPVNGFQARLYLFEKPMDIDKRLAKNARIKATRALTKQRRKTKDCKVYSCKIDKSHLSDFSLSFLKNIFLEAKWFCNDVIRSGIFDYDYKTKTVAVMNRDREWEVRLLRVLSSQIRQSLVERIKGDVINLSKLKKATGRRVGRLRFRKVVRTLPLNQFGSVFRIMNSKYAQVQGCRKSLRIRGLSQLPKDAEVARAELVNTCGDYYLKVTCFVDKEVHIKMGKKVGLDFGIETTVTTSAGEKFNIKVPETKRIKKLRRGFHMRTKKGSRNRWNRNEKIKKELERIDNRKRDQKNKLVRYLVDKYDVIVCQDENLSGWKQRFGAGVQMSCMKGIISDLKNKSETFIQVDKWFPSTRTCDVCGNVREVVPLLERTYHCSVCGNDTDRDTHSALNILQEGLGTKFPRLIRNVEDVKSPVELTTSICVAVQNTDKLLTEKREALAFRHG

SEQ ID NO: 109 - protein, 414 aa, synthetic construct
  REGION 1..414: note = Synthetic
MKEIKIKSRKQTIKRRKSMICKTYELKVDMSKLSQKTLEDFRRLFLEAKWFYNYLLSQENIFDINTTHIKQVIVMNKDKTTRIEEFKIIPAKFKQIIREQIVISIKSLSTKKKRKQKIGKLKFKSFVKCILLDNQCYKIKENNYIDLLKIKQYLKVNGLNQIFKESEFANAFLIRKHGSYFLNVVTFLPKEKPIECAKAIGIDFGIKTQMTFSNGIKAEFKIPVSRRVKKLHQNLSRKTKGSHNHFKNKLQLEKAYSKTNNIKKDISKKIIHYLKNNYIICIQNDNIKAWMSYNFGKQINESAIGGIISGLKQIPETLVAHRFFPSTKTCYNCGHIQKVDLGERVFVCEKCFYTEDRDINSAKNILKRSFEVLPERKEFTLAENETSTLKMLEYLNNIPHLKASLCSLKQEAIL

SEQ ID NO: 110 - protein, 267 aa, synthetic construct
  REGION 1..267: note = Synthetic
LKISGLNQIPKEAEFSNILLIRKHGDYYIKITTFLPKEKSIVYTKAIGIDFGIKTQMAFSNGIKAEFKIPVSKKIKKLHKNLSRKQKGSHNYYKNLLQLQKAYDEPNNIKKDINKKTIHYLKNNYIVCIQNDNIKGWQAYNFGKQINESAIGGIISGIKNIPETLVADRFFPSTKTCFNCGHKQKVDLSERVFVCQECDYQEDRDINSARNILKRSFEDKSKSLLPVERRKFTLVENETSTLKMLEYLNNIPHLKASLCLLKQEAFI

SEQ ID NO: 111 - protein, 418 aa, synthetic construct
  REGION 1..418: note = Synthetic
MKESLRKTREKRKSQDCKVFELKIVKDKLFSETLNQLNKLFIEAKQYYNWILSHENIFSIDTKIKEITVFNKKTEETKKVIVSLPAKVRGDLKKRIITAIKSLSTKKKKGKQEEVGKLKFKSFVNSIPLDNQAWRFITPNKIYIVKIKQYLKVMGVDQIPKNAEFANANLVKKNGDFYLYITVFLPKEEKLSHEKSIGIDFGCDKPLTLSNGIQIQYNIPVDRKIKKLHRKFSRQQKHSKNKQKTIIKLNKAYDKKNHQKKDINKKILNILGNNYKIAIQDENIKGWQKGGHGKKINQTAIGGLISGIKKLPGTVIVDRFFPSTKTCSRCGHVQKVELFERVFTCKNCGLVINRDLNSAVNLDNQVPQDMGKLKPVETKSSTLKIMERLNVIPFVKASLVNEIGTVISRKRSQLVKAN

SEQ ID NO: 112 - protein, 425 aa, synthetic construct
  REGION 1..425: note = Synthetic
MLKRNAKMTKNEKRKLTLQKTKEKRKSQVCKVYEVKVDKSSLSKEKTEHLNRLFLEAKWLYNHILSQENIFKIDCKVKKVQIMNKDKQFEEREFKHLSSSMKQNIYKRILTSIKSLTTTKKKGKKVGKLKFKSNISSIPGIFNLMRVECFKKCFRVRGLDQIPKESEIACIKLIRKNSDYYFHITTFQSKKEQIKTKQYISTDFGIKQTFNFSNGVKVDVKIKESKRIKKTQQKIARQEKHSKNRFKNRLKLQKAYDKRDNQKEDICNKIVSYLNTNFDYICVQNDNIAGWQRLYGKKINASIIGRTLSRLELLPKTIIVPRFFPSTQLCPMCSCKTKLSLSERIFKCSNCGFEEDRDVKAAKMIELEGLKQVKELVPMEYGELTLVENKTSTSMFEYFKTIPNVEASLCSLKQEDSLESVHSHL

SEQ ID NO: 113 - protein, 494 aa, synthetic construct
  REGION 1..494: note = Synthetic
MSGMRTVKIGGKRVVHAIGVSEMWYNVEVNAVLATKAERIKNTLRETKERRRTQRVFVYELKLQNLSKRKVALLERAFLEAKWLYNWLLSDIERLNMPVHKVKAVEVKVGDHYEQRELTVLGSQIKQETANRIKDNLRALGQLKRNGRKVGALKHKSFVNSIPLRQYGNTYKLDFERNRVRIQILGVFRVLGLHQIPDDAEIANAVLVRKPSGYYLHVTCCRSKERCVSSDKIGDAVGVDFGVCSKLTLSNGIKIDFELREPPRLKRLQRKLSRKRAGSKNRERVRLLLNKEYEKLNRRRRDAQNKVLAFLKHYGKVVFQDDCVKGWSSLFGGAVHSSGIGGLKSRLRHSLETPISVERMETTTRECFACGLRHDLSLSDRVIVCECGWDCDRDVNAALVIMRKGLGLSRNQAVGVGRPELTPLERETAARILGSNPYIRVSFLDEGGSLSQETGEDHPSRGSRIPFLALLPRIRGRRKHVPRDRRRPRRPPHA

SEQ ID NO: 114 - protein, 301 aa, synthetic construct
  REGION 1..301: note = Synthetic
GQHGVTYRLDPARNRARIQRLGEFRVLGLHQIPQGAEIASAVLVRRESGFYLQVTGYLPKETLAARQKFPHPVGVDLGVRDKLTLSGGLKVDFEVPETPRLNRLQRRLFRTKPGSKNREHLRHLLRREHGRIANRRRDAQNKVLAFLRRYPAVAFQEDFVKGWSASFGRQVHHSGIGGLKARLRNSLATPLPVERFERTTGECSACGEALEVPLSARVVACPRCGRTEDRDLNAARVILRKGLGLSPNQALGVDRSEVTPMEREAAVRILGSNPWVRVSFLGEVGSPALWCREEITHQIGV

SEQ ID NO: 115 - protein, 421 aa, synthetic construct
  REGION 1..421: note = Synthetic
MGAKNEKIKASLAETRARRENQRPRTFVLKLQNLSKNKERTLERAFLEAKWLTNWIIADIERLQLPLNKVHEVEAKAGDALEPCKLRVLGAQVKQRIGRRIQEDLRGLHALKQNGHKVGRLGFKRRVDAIPFSNQAFTLRSRGKENRVHLQKLGEFRALGLHQIPQKAEVANAVLVRKPSGHYLHVTVYVPKDEPKPLPDPGNPNQATDFKAVGVDLGLKNQAALSNGFVLRWRVRETDRLKKLQRKLSRKKKGSKNREHVVHRIRREHEKLRWIKQDIRNRVLALLRQYDLVAVQPDRIKGWQALWGGKVQGAALGGLLEALRTRLPTLVATERNAPTTRTCSSCGHLNPKVPLDRRVFTCEACGFRIDRDLNAALNVLTMAWPAARALGLDRPEVTPLEWEAAGRILGPNPRIRLSHAT

SEQ ID NO: 116 - protein, 457 aa, synthetic construct
  REGION 1..457: note = Synthetic
MAVFLFPLNWTTILEYNRNSKKFFGSIRRAKMTKAEKIKQTLHETKERRKNQIPVVYQLKINLDSISKTTKDKLFKLFLEAKWMYNYIVADIENRLNDTADKLKEVEIKDGENFEKRKIEVLSSQMKQGLVERIKQNLYALHRQKQNGYKTGKLQFKHYVNSIPLKQYGNTFKFVNQQKTRVKIQGFKKPFRVLGGHQIPEDSEIAKAELIRKPSGIYLFVTCYIDRDKYTKIWEQRKNKKGVVKPRVWQTFDASAGVDFKPAGFVLSSGLKFEWQIKETERLKKLQKELARKQKGSKRWYKTKEKIAREYERLTNIKYDAINKVCSFLCRYRKVCFQEDNIKGWKEGYFSKSVHHSAVGTVKRRLSDSLRADAVTIGHNVPTTKTCSNCGNQREVLLSDRIFKCPVCGQEIDRDLNAAINMLKVVGLDRSEITPAERETAARIFGSNPYILVSFLQ

SEQ ID NO: 117 - protein, 279 aa, synthetic construct
  REGION 1..279: note = Synthetic
MTRVKIQGINKPLRVLGGNQIPEDSEIAKAELVRKPSGIYLFVTCYIDRDKYTGAWERRKNRKGVVKPRVWQTFDVAAGIDFKPAGMVLSNRLKLEWQIKETKRLKKLQKQLARQQKGSKRWYKTKEKIAREYERLTNIKYDVINKTCSFLYRYKTVCFQKDNIKGWKDGYFSKSVHYSAVGAIKRRLSNSLRVPAAVVKSNVPTTKTCSSCGNRQKISLSERIFRCPVCGLEIYRDLNAAINMLKVVGLDRSEVKPVEWETAARIFRGNPYILVSHTT

SEQ ID NO: 118 - protein, 405 aa, synthetic construct
  REGION 1..405: note = Synthetic
MGFFKKRTNQTPITVELKLIPKKKWQREYLRRLFREATWLRNWTIDRLNSGWRFNWSKANKIKKVRIKTEHGFEMRRLEVLASQMKQGIQCEILQNLTALSELKKRGHKIGRLKFQREHRMIALTPQMFKFPKTNRVRFAKLPRRKSIYVRGYDQIDYWKQLDPNAEFGDSKLLKRADGYFLHVTVWINKNAYSQLHNAQFDSVGVDFGIRHAVTCSNGIQIDITGLEKPKRIRRLHRKVSRRKIGSSNRQKARVKLRRAYRKWVNKKRDVRNRIWSYFRKFKHVAFQDELIRFWKLLFGKQIEQTTIGSIVGCLKQRHPGSMVVDKSMPTTKTCSNCGCIQHVDWGQTVFRCYDCGFNIDRDINAARNMLILVGLEQTEVTPVEYETSVRIFGPSPYIRISLVR

SEQ ID NO: 119 - protein, 445 aa, synthetic construct
  REGION 1..445: note = Synthetic
MDTTSDKNQKIKESLKKTKEKRKNQVVKVYQLKISYSNLNKEQKQWLERVFLEAKWLYNYCIADIPNRLNSKTEKLKQVEIITPQGIETREMTCLSSQMKQGILDRIKKNLSDLSKAKQKGIKVGKLKFKSDYRNIPLKQNNITFKVLKDRNRIKLQGLKRAVRVLGLHQLPENCDIAKAELIKKPDGYYIYLTCYIDKTQVIKQEKINKPIGIDFGIKHQLTLSNGIKISYSVGETKRLKKLQKKLSRQREGSRNYQKTKQKIQKEHQKINNKRKDIQNKVLSLLKKYEYVIIQEEQIKNWQRGLFGKQIQKTGIGGIISMLRQNIETLILVDRFEATTKICSRCGSRKEEIRLSERIYKCEVCGLEIDRDLNSAINILKMGLEKVEGTTIKNVGLDRPELTPVERDICEAKWRLKEEQATAEILGRNPYICVSYTSVKQEAPN

SEQ ID NO: 120 - protein, 405 aa, synthetic construct
  REGION 1..405: note = Synthetic
MTKAEKIKQSLKQTKEKRKLQTPKVFQLKLQNLSKSDIETLNRLFLEAKWFYNYLVADIDNRLNKKAEKLKEVKIKTPNGFEKRELKILGSQIKQGIISKIKDNLKALKRLKEKGYKVGKLKFKSDFKSIPLKQYGITYKIDFKRNRIKIQGVKKWFRVLGLHQIPENADIANAYLVKKPSGFYLYVVCYLWKEEVLKEIKQKQVSIPVGIDLGIKYQLTLTTGEKFRWYIPETKRLKRLQRILARKKKGSKNYQKVKALIQKEWEYITNKRKDVINKVISYLKRFAFIAVQKDSVKSWHEGLFGKQVQNTGIGGITARLKHLATLIPVEFVPKFEATTQTCSKCGFKQKLSLNQRTFKCPNCGLEIDRDLNSAWNILKLGLKQLAKKNKAMADRLSLTPRFARG

SEQ ID NO: 121 - protein, 446 aa, synthetic construct
  REGION 1..446: note = Synthetic
MTREEKTEVWKNSLSKTKEKRKSQDCKVFTFKLDRDKLTKVKLSYFSLLFAEAKWVYNHYLSQSDIFHVDTKIDKVNALDKDRNPVVHELKVIGSQMKQAINRGQISNIKTLSSLKKQGETVGRLKFRSRVDSITLDQFGITYKLDGNFLRLQGNRSMKFKLLGKHQIPKDAEFANAVLTRKNGDFYLKVTCFVPKINQEIFPSEAVGIDVGCSTALTLSDGTKYNVKFPVSKRTRHLQRKLKNKPSHKIKGRKSSNCWKLYGKINRSIEKTSNCKKDRINKIVSEIAKKYKNICMQDENVKGWHSGRYGKSVQFSSVGGIMRALQSKAHTFTEVDRFFPSTQRCCRCHERQKVGLEERIFVCVHCNLVIDRDWNAALNILQEGLRIRLEKQLPTERRNVKPVELGIPANVCKSFTKKQEASVFSEPMETLEFTRQRPEASAFRQR

SEQ ID NO: 122 - protein, 424 aa, synthetic construct
  REGION 1..424: note = Synthetic
MTKKEQISSSLKATREKRKSQDCKVFEIKVDKSHLSKATCEQIKRVFLESKWLYNYTLAQENVFDADDKIKEVEIKVKDVFEKRELTIIGSQIKQSVLDGLTQNIKNLSKAKKKGISVGKLNFINRYDSIDLKQFGNTYKIKGSRIKIQGISQWFRVRGLNQIEGYEIANAKFIQKSGDYYLHITCYKKKEEQAIKTKRAVGIDFGIKTQLTLSDGLVGVELNYASEFPKRLRKLYRRWSKKEKHSANWYKKLEQINREFNYWTNKKKDTRNKIINILEKNFGIICYQNDNFRGWQRIWGRRMLSTGIGGITARLKKSATSVQVDRFFASTKTCSCCHHKQNVGLEERTFVCEKCGFIAPRDFNSGTNILQNGLNKIGVEYTEYTPAEMESSALNNLLEKFKAIPRLKVSSVAETGSLVPLGMR

SEQ ID NO: 123 - protein, 511 aa, synthetic construct
  REGION 1..511: note = Synthetic
MIETKRNKIKNSLRITRERRKTQNVIVLKLKIDNDKLNNKSIKTLNTIFLEAKWLYNYVINKEFNNDIFNIDPKIKNVNVYVKDHYETRELTYLSSQMKEEIINRAMDNIRGLHKLKEKGSKVGKLKFKSFITSIPLNQYTITYKIINNNYIKIQGIKQLLKVNGLDNLECYYEPASALLINNNNNNYYINITAYKNKYILEKPVNNQKILSFDLGIKNQLTCSNGSILNYNIPKSKREIRLQRSLSRKARYVEGTNSKNKLSREQSKNYYKNKNKLNREQTKTTNKRKDTINKITHYLTFNYDIVVTQNDNISGWQHLFGKKIESTGIGGIIDALKHKASTLILIDRFIPTTKECSNCHNKYNIKLDERIYKCTNCGFIIDRDYNSALNMIYYGIIKLNELLKIKNKKLNNYFKKYNINLNVPMERRELTPVEIIASGFEGLSISPYVKLSMVNEAGSLYALHEVVHLLIVTPDACQDNGRSQPTKLGAKVYWVSDYYSEIIYPHEIKIY

SEQ ID NO: 124 - protein, 268 aa, synthetic construct
  REGION 1..268: note = Synthetic
LRTVNGLDNINTFDLSNAVLIKRNNNYYINITAYKNKLNTETNQILSFDLGIKNQLTLSSGLQLKYSIEKTKKEKRIQRILSKKVKGSNNYRKLKVKLNKEHDKTKNRRTDTRNKIVHYLTSNYNIIITQNDSISGWQRIFGKRIESTDIGGIIEALKHKASTLILLYRFIPTTKECSKCHNKYDIKLNERIYKCSKCGLISDRDYNSTLNDIYYGTKTHKFKKLKVPVEYREFKPDRDNASTLKGFNVSPYVSASFVSETGSLNVLT

SEQ ID NO: 125 - protein, 432 aa, synthetic construct
  REGION 1..432: note = Synthetic
MDRQSARKLTKTKRQSQTCKVYEVKVDRSHLSQKSLDHLSSLFREAKWFYNYCLSLENVNKADYTAKSVPVKVKDEFEERKFTVLKGQMKQSIKTRTFGSIKALSTLKKKGKKVGRLKFKSRVNSIPLVQLGTNKHSGTYYIDKDRSRIRIQGMTQWLRVRGLEQIKDYVDIANATLVRKCNDFYVQITTFEDKEERLVPDASIGIDFGCQTQLTFSNGIKAEFQVTVSERLRRLDRRIDKKVDGKVGKNRPSNNRRKLQQKRHKEYERITNKKKDIRNKIVSVITKNYKYVCFQDESIHAWSMGGHGKKIQNSGIGGIISDLKHKSHTPVMVDKFFPSTQLCPQCGALNKLKVSDRIYECGCGFVEDRDIKSAQCIETEGMRTLELPMDRRDIKLEENVSSTFFNFLSNIGGIKASKMCSMSQEATGLAPS

SEQ ID NO: 126 - protein, 432 aa, synthetic construct
  REGION 1..432: note = Synthetic
MDRQSARKLTKQKRKSQTCKVYEIKVDKSHLSQKSINHLHSLFTEAKWFYNYVLSNKNINDADYTIKSVQVKVKDQFEERKFTVLKGQMKQSIKTRTFGSIKALSSLKKKGKKVGWLKFKSFVNSIPLVQLGTNKHSGTYYLDNSLSRIRIQGMTQWLRVRGLEQIKDGVDIANAILVRKDNDFFLQVTTFETKEQKLVPEQSIGIDFGCQTQLTLSNGIKIEFQVPESDRLKRLSRRIDKKVNGKTGKNRGSKNRRKLQAKRRKEYGRLTNKKKDIKNKVVSVITKNYKYVCFQDESISAWKAGGHGKKIQNSGIGGIISDLKHKSETPVMVDKFFPSTQLCPQCGCLNKLHVRDRTYKCACGFTEDRDFKSAKCIKVEGMKKLKIPTDYRNFKPEENWSSACFDLLINIGGIKVSKTGSMSQEATGLAPS

SEQ ID NO: 127 - protein, 424 aa, synthetic construct
  REGION 1..424: note = Synthetic
MSIKETLKLTREKRTHQVCKVFELKVDVSHLSKKTKNDLNLLFVEAKSIYNHFLAQLDSGTKTRDIDTKIKEVLVKVKEDFETRELTILSSQMKQGLLTRMENSLKALSALKKKGYKVGKLKFKSFLKFNAIPLKQYGNTYRIINGNYIHIQNIDSQIKIEGLKQIEQNFEIANANLTKNGNDFFIKVTCYINEEDMQQMENKIYETLGIDFGCQHQLVLSNGIVIDYLISNAKRLRVLNKEMHRRKKHSKNYNKTIRKRQKTYRKENNQKKDIKKKIIHVLNENVEHIIIQDENVKFFQKKHGKKIQKTGIGGITGNLKKLPTTIVVDQFFPSTKQCFCGAKQEIPLWQRTYSCPECGLKMDRDLKAARIIEIEGCKQFLIPSGRRKSTPVERAPLLSGLKEISHLKARVLVETGSSDALAEE

SEQ ID NO: 128 - protein, 429 aa, synthetic construct
  REGION 1..429: note = Synthetic
MNMNKNETIKATLKATRAKRKNQTCKVYEIKLDKSHLNNATKTHLNRLFIEAKWFYNHILAQHKIFGMDDNVHQVPVKVKDIFEIRDLQCLSAQMRQSILSRTQDNIRGLAERKKKGYKIGKLKYKSLIQSIPLKQYGNTYKILNTKYIRVQGIKQKLKVIGLKQIPVDSDIANGTLIHKNGDYYLSITTYQEKGKTKQVHANKSVGIDFGLNRQLMLSRTGIAIQYSIPISPKLRRIARTLSKQKLHSKNWNKTRIKLNKEYDKTTNIKEDIKNKVVSFLKNNYETVCVQDESLKAWQRIWGRKILSTSIGGIISTLKKKVHTLIEVPKNFPSTKTCSKCGNIQEIALDERVYICKNKNCNNILDRDHNSADNMENEGLKQVGTVRTELTPVEIEANTSMFLRYLNNIPYIRASSVYESGSSRLLAGE

SEQ ID NO: 129 - protein, 262 aa, synthetic construct
  REGION 1..262: note = Synthetic
LEQLPPNCECANATLLHQHGDYYVAITTYTSREHRSAMVAPAQSIGIDFGIKNQLSLSNGIRIRYTVPVTRRIKQLCKKLSRKQYRSKNWWKMLYKLLKAYAKTTNIKRDIRNKLIHFLATNFQVVCYQNENLGAWRYLWGRRMLSTSLGGIIRMLEVKVQTPVEIDRFFPSTKTCSRCGHQRLISLEERTYVCHHCGLVIDRDYNSSCVIEKEGNSILGRGPTEVTPAETNTSTLALEYLNKIAYVEASMVAETGSLTALA

SEQ ID NO: 130 - protein, 456 aa, synthetic construct
  REGION 1..456: note = Synthetic
MSQICKQYEVKIDISHLNSQTVNHLNGLFREAKWYYNSVIGSRNISELSNDYYKISQVSVKVTDHFEARNLDHLSSQMKQELVDRTKDSLKALLRLKKNGRRVGALKFKSYVNSIPLKQYHNTWWIMDKNHIHIQNIKQKLRVKGLSQLPKEAEITSAVLIRKHGDFYLHVTTYQTPRRQKLDKDKESNFSRNQSSNPAKRSTGIDLGIRNQITLSDGIRINYEIPVTKKIKRLQRELSRRQERSNNWYNSKDKLNKEYEKTVNQKKDIRNKLIHKLTETYSIICCQDDPIKVWMKNYGSKILNTGLGGLTSALKQKTHTPILVPRFYPSTQKCSNCNAINKIERGRSVYHCPTCDLVLDRDVNGSRSIKKEGLKMLGNEVAVPTEGLTRRELTPVDTSASTLTHNEALVEYFKNIPRVRASVVEEAGSPLKAMIVMTLNEAHNDIAAVGSSQSSF

SEQ ID NO: 131 - protein, 444 aa, synthetic construct
  REGION 1..444: note = Synthetic
MERNIGRELFLGKPAKNRKIKETIRRTMIRRKNQACRTYELKIDQSHLDAEVRGHLTRLFLEAKWFYNSLIAQGKANRDGLWNADYKAQKVMVKRKSVFEEHELRCLSSQMKQEIIGRAKDNIVGLSKLKKKGRRVGGLKFTGRVHSIPLNQYGVTYWINSNRIHLQKLKRPLRVRGLRQIPKDAEYANATLIQRNGDYYVHVTTFQPKPQIQFKQKSIGVDGGIRKQLVLSNGVEIEESVPLTKKIRRLHREFSRKKKGKNRAKAQEKLNLAYDELTRQRRDIRNKVGGKLTRTFEVVCVQDDNVSGWQRLWGRRILATGIGGLMSALNKAHTPAPVDRFYPSTKTCSRCGHMQNVDLDEKTFRCEACGLVIDRNLNAAINNEQEGLKNIGVPVVRREFTPVDTKTSAELVGYFNSIPRVRASLVEEAGSRASARKPTTSVVW

SEQ ID NO: 132 - protein, 455 aa, synthetic construct
  REGION 1..455: note = Synthetic
MLETKYRDGNRRDEKNSRIREKRKETLLRRKTQEAKTFELKLDRSKISRERLSLLKRLFLEAKWFTNYVIANGVTNFKPHKDYKIDKVYIKVNNTFEEREIRVLSSQMRQGIIKRLQDNIRGLAELKKKGVKVGRIRFRKVVHSIPLMQYGITYTINREKKMMHIQCLRGFKVLGLEQIPDDAELTTANLVERNGDYYVYVTCYIPKQNNDDEITTNNKNNNNSKKNKNDSKNKKAIGIDLGIRDQITFSNGVKIAYSIPVSKRLRRLYHWFSRSKFNSRNREKLLLKIKREFYKQSNMKRDVINKVTHYIINNYDYIVFQKDDIHSWQKLFGQRIYETSIGELRNALKKRRKASTPIEVDRFIKTTGVCPICKTTVELKLSCREFICPSCNSLHDRDVASAIVIKNEGLSLWNVGETPEDEHTSASSMLEYFSRIPHVKVSVSMNREAPSFRKG

SEQ ID NO: 133 - protein, 422 aa, synthetic construct
  REGION 1..422: note = Synthetic
MQAAKYQLIAQKRKETKERHSRMAVRAYELKAERNHLGAAVLEKLERLFIEAKWFTNYAIAEGPFAVSWKVKCVPVKAGGHVEERELKVLSSQMRQGILKRLQDNIKALAVQKRKGIKVGKIRFRREVRSIPLPQRDYTYKVLDKGHIRVQNVGILKVSGLDQIPPGAELANAVLIHRHGDCYIHITAFLPKKDEEKPPYFVGIDFGIHDQLTLSNWIKVSFEVPHASKSIRHLMRSLARKRPGSKRYRITLQRLEKEFEHLANIRKDIAYKIGHVLTVHFALIAFQDDDIHGWERLWGRKVMTTALGRLKQFLEWHGAVAVEQYYPSTQECSLCHRRVGKLPLDERTFKCPYCGAELDRDVNAAKNIAEWGLRSAGSRAERPLRPADEAASALLQRELLSVPYVRAQVASVKREASPLTAG

SEQ ID NO: 134 - protein, 394 aa, synthetic construct
  REGION 1..394: note = Synthetic
MQSSVAPTFFSLMRKLKKYQSSSMKKKNPRTELRTLTTLSSQMKQGLLEQVQEDVRSLAKKKKEGFKVGKLKYKKIVKTIPLKQYNITYKIQQPNYIRIQGLRQWLKVRGLKQIPKNAEFANAKLIQKQNDYYLHVTVYLPKRKRKHDNDTRKQSIGIDSGIANQLTLSNGIQIKYNLQIRKQLRRTYRKLSRKKTGSKNYLKTLVTLRKLFNHWNNRKHDVINKIVHILTTHYKIICYQKDNIKNWQRLFGTKLLNTALGELFVTLNKRATTSGVVDQWEPTTKRCALCQTVLPEPIPLSDRTFVCLNCDWTSDRDWNAALVIEVLGLQELDLDLYSTHFLDFDLELPTERRNVKPLETKTSQMILNGLFQQIPFVSSEVLSMNEEAHSLRCG

SEQ ID NO: 135 - protein, 460 aa, synthetic construct
  REGION 1..460: note = Synthetic
MSRPSGNISKNQQIKTTLLATRERRKHMICKTYELKIVNHHLPKYALLHLHQLFLEAKWFSNAIIGSKDIFSFDSKIESVSVICPDTIDERPLTHLSSQMKQSLVKQVQRDIISLKKQKEKGHLVGKLIFKKCVETIPLKQHGNTYTVKRPNKSHIQGLKGYFKVRGLHQVPKDAELAEAKLRYISGDFYLLVTCYLPITSTSKKTITNEQQKQQKRVEIAKQVLGIDGGIANQLTLSNGIQITYNIQIPEKLSQLCKRLSKKKYASKKYVKTKIKLQKRYKKWTNRKIDTTNKIISRITNNYAYVAFQDDSITNWQRLWGTRLLNTALGRLFTTLERRVVSSCVIDKWEPTSKRCSDCGYILLKQVPLDERVFQCLNPECRLELERDWNASIVDKKLSIGELASINSEINHRFPQELRKKMPLETSTSIQELCQSLDRLPFVSAQVLSMKREALSFRLG

SEQ ID NO: 136 - protein, 430 aa, synthetic construct
  REGION 1..430: note = Synthetic
MTKAEKIKNTLKETKERRKNQVCRSYLVKVDMSHLSRQKLEQLNRLFLEAKWFYNYAIANDPFELDHKISSVAVKVGEKFEERELSIISSQIKQEILHDIRSSIINLSRKKANGYKIGRLKFKSYIRSIPLKQFENTYKILDGKYVKIQNIKGKIRVNGLKQIPEYTEMANARLICKHGDYFLRIVTYTSKSDLAEEDRKKGRAAPVDNSAIGLDFGIRQQMTFSNRVSIEYDIQLTKRLKKLYQQLSRAQKSSKNRQKIILKIQKEYERICSRKADIRNKIVSYLKHNYQIICYQEDSLKAWQRVYGKKVMDTAIGEIMSALEERTHTPVAVDRLFLSTKRCSVCGNIKDMQLSDRVYICEKCGSVMDRDHNAAVNILYEGLSRVPAERRELKPVETLASALKMLEYFRAIPHVRASLVCEAGSLTASA

SEQ ID NO: 137 - protein, 421 aa, synthetic construct
  REGION 1..421: note = Synthetic
MNCKKQTAIKTTLVETRKRRKDQTARSYTLKLDKSHLGAKKAILERLFLEVKWFSNHALENQLKVDCLIKTVRVKVGSRFEERAINLPSQVRQEVLDWMRDDVRSLHAKKVKGYRVGRLRFKRVVNAIPLKQYGITYLIAGSHVRVQGVGWLRVNGADQIPADAEMASATLVRRHGDYYLHVNTFTPKEKNKNGLAIGSDFGIKNQVTFSNGVQINYAVPLPKRLRGLCKSLSRKKGSRKGERKSKSWLKALAKVQQAYAAHTNHKRDIRNKMFHFLRANYQYVAFQNDCVAGWQRLWGRRILESSIGGLRSTFFRVDTPIEVPRFYPSTMTCSGCGHVQRVGLDERVFRCEKCGLEIDRDLNSANNNLTEGLRSVGVTPVEKETSILMLKYFNSILGVRASLIREAGSPQALAVGSSPPL

SEQ ID NO: 138 - protein, 431 aa, synthetic construct
  REGION 1..431: note = Synthetic
IMTYTLKVQIDPTGYTEYLEKIFKHAYKLKRELVNYYNRQEYRRRNSDDYKYLAEETKLVNELQEKIKETKDKELKKALKSEYKERVDELKKGWIALNNAFELGSGKFVDYKNMGQASVMYERYAKEGIINWSSFENMAEATKQAYLKRRSQSESDNFMRVPKANDFTTIWYRKCNTNISMDGISFGKRGNKITLPWNFRNDDEIRLSYALEMQKLALYAVKRVLQKDNTWKYYALMVFDGVPYGTRDSLPTKGKVVISLDIDKLEIVAKNDFVNKELRFDLTNDLGYSEKLSEIDTMMNESRRVNNPDNYEENGVPKKGVHSWKRTNNYIKLSNKKRYIWHKIKQYRKNRFEKIVNDILELGDEFIVYKEDFKTLQQRKDFDKETMSWFDTRKQRGFEIMFNAPYEFLVLLNMKLSYFGKTAEIFVKRES

SEQ ID NO: 139 - protein, 428 aa, synthetic construct
  REGION 1..428: note = Synthetic
YIMYTLEVKLNPKGYEAFLDKRFRNAFRLKKEVIKWFNRQEHLRTESEEYKILAKKQQAYSELEKQLKDEKDKAKKQELKEAKKALGSDLKKEWIELNNSYQLGSGKFVKYTQLGQATNMYQRFTADNDSVHWSTFNDIAMTVKQAYLKRRKQAESKNFLPSPRYFDFNTLWYRKCLNNITNTGVYFGKRKNKVFIPFKFEKDMEIRFLYALERQDLVQFALKRIAVHGKYKYSLLLVFEGIPYGVDKELENKGTVKIFLDVKKLAIKAVNAKNDTVRLFDLSNDFGYSEKLADLDRKIERSRRLSNPQNYNDNGTIKEGRLTWNYSNNYQKLRDKKRYLWHKITKSRKNRFGQIANELLLMGDEFVIYKKDFKSLQKRKDYNPEEMNWFDKRRQQGFEIMFNAPYEFLSILKIKLGYKEKELLEITE

SEQ ID NO: 140 - protein, 421 aa, synthetic construct
  REGION 1..421: note = Synthetic
MYTLEIKLDSRGYETALEKRFWLLYKLKRATIQWFNTQEHRRVTSEEYAELATLFKEYLEIKDTLSEKERKSEDKRFMKLWSELNKSFKLDSGKFVKYTDLGQASNMFQRYASEGYLNWSSFEGIAVDVKTGYLKRRGQSDSVNYMKIPPYRTFNGFIVRKRNMNVSQEGIYLGGHRGAEKEKGFFLPFDFSANKGKDLALAYALSEKKMSYWGIYRKFDKHGKPLYFAQIIFDGQPYNVNHITGKGKVTLSVDVDKLALVAENGDQRLEFDLGKYSYVADELSRLDRKIENSRRLNNPQNFNPDGTIKSGVRLKWNNSKNYYKLLGRKRYIWHKVTQTRKNFYGFIANALLSMGDEFEIHKQDFKSLQERIKYNKETMSWTQSRRSRGAEIMFNAPNEFITILNTKLAYNGVSPVIVIKK

SEQ ID NO: 141 - protein, 463 aa, synthetic construct
  REGION 1..463: note = Synthetic
YFVLTLPLKLETWQKDRLDKRFRVNCSIYNALLREGVKRMNQMRQTKRYRTLLEQLDRERDASARKQIYRELDQMQKQYQLRRFDFSKMATPYRQYFKENTDAPVVQNLADQAWRAVNDVICRRGSQVHFKKEEELTCLQGKTNQTSIRYQDGHLLWKGLCLPVRRNRSEYERQALSQEIRYCRIKRKWIRGRLRYYAQLVLRGTCPVRRRIPIKEGTVGMDIGFQKLVCVGMHEIREYAIPSLEQDAWQKEKRRLKRRMERSRRAMNPKNYDNQGKVIPGCFFWKTSINYRKFKNELREITRKQMLRRETLQRSLMDQCMAMGDVFLAERLDYAKMKKRAAPGEKKAPLGRRVEQTALSAFFETMAWKMEQQGRKLILVNPVTTAAGTMNHQTEKKESLSPGMEIRLIGGCPVDRRAYSAFLLQHVNPDTGTIDFQKCREDFPAFLHLSQQKQNKENSQMAG

SEQ ID NO: 142 - protein, 451 aa, synthetic construct
  REGION 1..451: note = Synthetic
EGYFVLTLPLKLEPWQERRLNKALEVNRQIYNAMLREGVKRYRQMAQTRLYRSLKEKLKACREPAERKQIYKELDCLQGQYRLRPSDFSKDSTKYRRYFQDNTDAPIVQNLAACVSRAISNLLNGRAEKVYYKPADGLNCISGKTNKTSIRYREGFLYWKELRLEVVLKGNAYERQALSSKLCFCRIKRKMIRGRYRYDAELVLKGVCPVKKAIPICKTGTVGIKSSLNSMTAVSAEKIWKTRIPRSSDELERQRKELARRLERSRRTNNPENYEKNGRVRKGVFLWHQSINYRNLIKEYAEILRMQKVLRDERQRHCMERLLKMGDSFVFEEFSYQSMKYGGRKVEDAAPASFFRRFRWKAERQGRICRPVDALQARSSSMNHSTGEVEKLPASQTSRRIEGYEIDRQCYGAFLLRHIDPENNRIHIESCRKDFPQFLELYQSYELRQAV

SEQ ID NO: 143 - protein, 462 aa, synthetic construct
  REGION 1..462: note = Synthetic
GSYFVLTLPLDTKPWQEAILNKRFEVNRKIYNALLQGGFKRYCQMTQTRKYRELIEKLDQTREAADRKKIYRELDEMAAAYRLTKAELSRDSTQYRQFFPENTDAPIVQNLSANAWKSLYSMMCRRSKTLHLKEEGQLNVLEGKSNKTSIRYADGKILWKKLEIPAVLKNSAYEQEALSREIRYCRLKQKEIRGKQRYFADIVLKGQCPVRKVIPAAHPGTVGVAVTLKQFYLVSRYEIRVEEFTRYSEALNVKRGELIRKMEVSRRLNNPQNYEENGRIRAGSLKWIYSKNYQKNRKRLREIARKQQAIRREERGKLIRSLLTMGDTFVVEQIDYRKLKERHFGKPVESSAAAGFLREMEWKCSVQGRTWKSIESGTLYKTWKDHEKERTEQPISQESGENQAHTHPDSQPEAIWNTEPDACLHRAFLLMHADQEGIDWQGYQRDWNDFVKLRQQFHGQTE

SEQ ID NO: 144 - protein, 482 aa, synthetic construct
  REGION 1..482: note = Synthetic
SSYFVMTLPLMPELWQKEKLNKRFEVNRQIYNAILGEGLKRYRRMKERRDYRTLIQMLDSTADVKERKRIYEKLDILEEEYRLRRFDFTKDATKYRRFFQKNTDAPVIQNLAVHAWKAVHSLVCRQAASVHPKAENELYSLEGKTNKTSIRYQDEKVIWKDLEIPVRTKGNDYEKQAFAQEIRYCRLKWKWIRGNKKYYVDLIFRGKCPVKPFLLAEDRKNSQREEARTKEKKKKVGMDIGLQKVVLVTDKAILDLKLPEKDQELEKARIYFARKLERSRRINHPDYYTEDGRIISGRKKWNDAINYRKNKLKYREILRKQAALRTEEQQKLIKLILTTGDIFFAEQLAFEKMRNRKEKQEKGKWNPVFGKTIENVAAAAFLRKLEWKMKQHGKQIVFVDPVKALAGSLNHATGKREILPYYKQYRNVSGYMVNKRAYSAFLLRHMEADSGVINLEECKKAFPTFLILNEQTYGSQREDKVS

SEQ ID NO: 145 - protein, 481 aa, synthetic construct
  REGION 1..481: note = Synthetic
TGYFVLTLPLKTEKWQEDVLNKRFEVNREIYNALLRGGLSRYAQMVRTRRYRSLIQKLDAEKDLKERKSIYKELDEMQAQYRLRKFDLSSDATPYRKYFKENTDAPVVQNLSVQVWKALYALMSRQAKVVHPKKQGELRALEGKTNKTSIRFQDGAVFWKGLRLPAYIKGNTYEREALSQEIRYCRIKRKWIRGRECYYVDLVMCGKCPVRNSGSEMVSGNNGRNRANVAAEEKETSVVGLDLGLRRITAVSDTEIRAFSLPEKDRNLEQRRRELARKMERSRRINHPENYDGSGQIRSGEKKWHYSNHYRRYREKYRELGRLQKIYREEEQRCLIREIQEMGEVFHAEKLDYQKMKRRNGAVRLGRAVEDTAIAGFLNKLEWKLRQNGKNLIYFDPVKTASARWNHVTEEKEVCSPRSAFRSIDGILIERQTYSAFLMQHGDVKTGKINAEECRKAFRSFMDIYYLSVAGNRYGTGEAAG

SEQ ID NO: 146 - protein, 518 aa, synthetic construct
  REGION 1..518: note = Synthetic
EQYFVLTLPLMTQAWQRDVLNKRFEIHRQIYNALLCQALTRFRQMAQTRAYRRVQEALSRTEDEKERKKLFKERDALIEQYRLRKFDICGDTTKYRQNFKEHTDSPVIQNLANEVWQAIDNLIHGRAGQVYFKQPGQMKSLSGKTNRSSIKLRGDCLVWKGLEIPVRKKKSSSYEEQALSQEIRFCRIKKTVIRGKDRYFLDVVLKGAIPLKGAVPLKQAIPLKQMPEEDDLNSCQERQRVPRSEEKLRIGCKNKFRTECEDKLCKEHEEKLRTGCAEENHEAVNVGLDIGFRKLAVVSEDAALVYELPEKDRGLEKKKREIVQYMERSRRSMNPDNYLPDGRIRPGSKEWTYSKNYQKAGRKYREICRKQSVLQRQEQYQLVREIISYGDRFFVENLDFAKLGRRKPNGVYMTGAAPGEFLRILDYKLSWQGKQLYRILPFLVKASGFNHHTGAYQKMPLKKSWRIVDGQKVEKNLYSAFLLSNLAEDMQSFDLERCTEKFPRFLEGQRAYLQTLAS

SEQ ID NO: 147 - protein, 488 aa, synthetic construct
  REGION 1..488: note = Synthetic
EQYFVLTLPLKPEIWQQHVLEKRFEINRQIYNALLAKACRRYRQMIQTRAWRANQERLSEEADKEARKRLLKERDLLIQQYRLRKYDICHDATPLRQHFSAHTDSPVVQNLAAEVWQAVDALIRGRGTAAREKAPGQLRSLSGKTNNSSIKCREGVISWKGLLLSVAFKGNAYESQALKKELRFCRIKRESIRGKERYFAELVLKGTPPVKLQPDVRIDGRSGRIKVPGTAVQKVGIKAGFWKIAAVSEQEAILCDLPGKRCDLEHRKRKLTEYMERSRRGANPENYLPDGRIREGSADWKISNRYQKARSKYQELCRKQRALQREEQFLLARRITSMGDRFYIEEINFLKLGKRKPNSAGMQQSSPAAFMKVLRQKLCQQEKEVLWIQPFTLKASGFNHHTGSYQKMPLKKSWRIVDGQKVDKKLYSAFLLSNTAADQKGFDTESCREKFLLFLEHQKEALERYERESGQRNTHGGQALRTEDVRSA

SEQ ID NO: 148 - protein, 462 aa, synthetic construct
  REGION 1..462: note = Synthetic
VSVITIPLKTEIWQEDILSKRMELCRDVYNTMLGKRLKDLHKIEKLPEYEKAIAEIKRVYSISGPQDLAMEKKTISFKKAIGTKNTILSEWGFTEFGFNMIAIEEAKYFKENIPATTALHSIASPMWAAFDRYLYGDGKMVHYKKQGSFNSLASNGKSGIRLVNSVGETVFRRHGKEKLSLVCGTKGNKILKIPLMIDNKNKYMLEMLDRDIRIIRIVRKKVKGRYRFSVQLTVDGAPAVKKNDNGENLHSISQGDVGIHIDTRYITIASKDGIKTIDLSYNDDIEDKIASLQVYIDNSRRISNPENYNDDGTIKKGRMRNGQRITLKWTYSNGYKKAVNEIANLKRKAAESRKIRENIIANDILSIGSHIVVNDFSFRDSKRKKKKVDYSISGKQLTKKHDRKAIEQNAPAQILNIIDRKLVSAGLDTIKRKNIEIDKSKDDYREYYAKELYNEALIDTAN

SEQ ID NO: 149 - protein, 448 aa, synthetic construct
  REGION 1..448: note = Synthetic
MSVITLPLKVEPWQADILNKRMELCRRVYNSILKEKLQSMSALESDSEYQAAIQGIKQVYQISDEKLKAKELKSETFKGYRMLSSSMLKEAEISEYAFIADATRKAKLYSENLSANMAIYSIAKPLWTSFDSYLYGGGAEIHEKKYGDINSLATDGKSGIRITNDDGATLRSKIGGERAYIICGTKSQKCLKLPILVDSKDTYLKEMLDRNVKIVRILRKKINENYKYYLQLSVEGAPAEKKDVEGHILHEVNTGAIGIYIDTRYLVIANAKCIHTIDLNFDTEYSLEIEQILRYMERSSRISNPDNFTENGNLRKTDNEEELTWKYSKRYAKARKRLNNLKRIEAERRKIRSYTIANEVLSHGSDIVINDYSFKGAEMRIYDESSGRYKKKAGSVIAANVPAQILTIIDKKLIASGHNKMIRKHITVDFTIPDYRAYYARYLLDSTF

SEQ ID NO: 150 - protein, 617 aa, synthetic construct
  REGION 1..617: note = Synthetic
TSVIELPLKTEKWQEDRINKKMKNIAAIYNAMLRYELDKLTCLKSSSEWQENERTISHIYDLTKPFETVKKKYDRIYEFKIKSAIKEQDESSDDVDKDKIKETFLAEKKELLETLEADRKAFEDEILQQIDMDAISKKAKAQTKKKSQSSDIYEDAVNNLLSKKKSELIEKTGKVMLKEAYGIKGELLKNAKFTQFGFASDVAMFTKHYITSIGANMASLTVANPMWVAFSEYFYGNGRRIKYKKPDSIDAIRTDGKSGIRLIFENEKYYLLISNSPYKKEKNGNVYTFKSCYGQANPIKIEVKMDDKEYNREMMNAKISGICIKRKLIRNRYRYYVQFSVRRHPYQKKDADGNLKHSVARGKVGVCIWRDVIGAYSSNGVKFFNLASGSEKYDKERGELSRKMDEILRMNNPDNFDEKGRIKKGKIVDGKRVRLTWVKSNLYKDLSMQYRELSRRFVENRTIEQNKIIYDLLTLGDEFYIYDGNYSTIKGNLEDKSIEEQKKKADRRRSIQTVAPYMFISKLNNKLAALGCDPVVKVNVSNDTYWYNHAKGRQDKDSFGANYMMLNSFESVNHTIYRAFLILYYESKTKQYVIPEEDWKLFLERTKNTSFLRARNE

SEQ ID NO: 151 - protein, 473 aa, synthetic construct
  REGION 1..473: note = Synthetic
CSVLEMRLKTKPWQESLIDKKMECARAVYNATLSEAMKNYNRIINTREWQDDQKKVRAFYSGRKAGEKIPQEIKDIFNKRQKQYQGALLTKFGIAKIAQKHARYYNKNVSSNMASVGIGAPVWSSIDKFLYGDGKKVKYKRPGELNSLASNGKSGILLKQDEKGYYLYLSNQKAKAKPLKVYLYDTRTDYDRDMISRKILIVRLVRKAYENGYKYYVQLTVDGAPYERTDEKGEPLCKRGEGKVGLVIDGNNVYAVSDKESRMFKLDENFKEYEKAMEEIETRIEYLRRLNNPNNYEENGTIKRGRLTWNKSCEYKRAAKEKKEMTRKRRETLAITQNVVIKEILEMGNDIYVEKKSYRTKKENYDPDKSDAEYSVKKIRRKKIQNFAPATFLEKLKTKLGDRGALTEISGFGEYFYYCCDSGKSDEERFKNNKVTLDGRVYNAFSYRAVMLKNMENKKLDVEGVKKDLSIIG

SEQ ID NO: 152 - protein, 446 aa, synthetic construct
  REGION 1..446: note = Synthetic
RFIVEFPLSVEKYQADIIDKRLEIARRIYNQMLKKYKNIYKQMIQTKEYRNIISNLGIERKKRKTENKKTAAEKELYKQLNELYKHYGFTEFGMINMSYLQRKPYENHITATIASKIAQRLWSAWNRFLFMDGEEVHLAKYGEFNSVESNSPKASILLKTNYKSKNGSWKGEKTVIVWSGLELPMKINQKKPYEIEALQHEIAYNRIVRKFVRGKNKYYVQIVFKGTPPVKYNDTGERKHSIGNGVVGIYVDTEKVFAVYKDQVFVHDLADGVQSIEDDVAELQQRMDRSRRNMNPDNYNEDGTIKPYKDQHEWVYSSHYKQWKNLCKELYRKQAAIRKQQHYILANEILKMGNCFYIQKIDYKKLQQRISRQDMITAHKRSRKNQGKGIANRAPSMFVEILKQKALQSNLEVTIVEKNSCECPDILSNDREKIHYALALSGQTTC

SEQ ID NO: 153 - protein, 514 aa, synthetic construct
  REGION 1..514: note = Synthetic
KEIFVLKLPLKTQKYQEDIIDKRLEISRRMYNQLVAKTTNEYDQMIKTRRYRGIREELSQIYDSKTEEEKSAKKRSSRERELYQMLNDMYKEYGFTDFSMRTLANNQRQPFKKNIDSATATKIGYRLWSSWNRFLYGDGRAVHFCRYGNYNSVEGNSNKSGIRIKKDVISKKNVWSGTTPLALLWNGLEIPVVVKNIYEKEALECEVAFNRIIRETVRGKSKYYLQIVLKGKPPIKYNEKTGELKHPIGEGRVGIDVGLQTLAAVCENEVKLVPLASRVRTKDIEDQKAELQQKMDRSRRAMNPDNYNEDGTIKKQGAKKVIWVKSNHYKQMQLQLKELERKQAAVRKYQHYVLVNELLAMGNQFYVVDKNYKQMQERKDLKQKEDGSYESRKNYGKVINEKGPAMLLNLLSQKLEQCDGEYTKVSAASKICQYSHISDEYQKKETAERYDVASGCQKNLYVAFLLTHMIDATELDKAGCKESFETFKKMHDALFDQMRQQKESGTKFPASMGI

SEQ ID NO: 154 - protein, 351 aa, synthetic construct
  REGION 1..351: note = Synthetic
QCQIKLCLTRAQEAELDRWLWHFTGVYNWAIRKIGCDAAGGIYYRKRDFQNLLAGHGRKLGIPFHTLQGVLVQVRTASDRCGKRLDKNPRLKGHRNRLNSIPLPDPIKRPDGCRIKVPSIGSIRFHKQDIPDGRIKCGRIIKRASGWYLALSVDAQPNIVRTFKMKAHREVGIDSGYMAIVTLSDGERVDAPKECSAMEKRLTQAQRSGNRKLVEQLHEGIVSRKKDRNHKLSRYLVGTCAVMTFVHDNNQALQQKPGKSVANANIHQLQKMLAYKSSSFGRWFELMDGCWSTRTCSAYGSLAGPKGRHGLSVRRWVSEAYGASHERDIDTARNALISAVGSVVEEARDAA

SEQ ID NO: 155 - protein, 531 aa, synthetic construct
  REGION 1..531: note = Synthetic
QRQLKLRLNTGQEAQLDTWLFQLTGVWNWAIRKIAQDAKDGIYYTQKDFHNLLANHGKKLGIPSHTLQGMLDAAYTAWQRCYKKLAKKPRLKGRRNTLTSIPFPDPFKTPDSTHIHVPGIGHIRFHAQDLPAGRLKSGRIIKWASGWYLCLFIDAQPQAIPPAAYGEIGIDPGFQTPLTFSTGEKVAHPHELRQTAHRLAQAQRGGRKHLTARLQERLANQRKDRNHKLSRRLVADNRVIIWSKDHDKGLARSFGKSVASAAHAQLRGMLAYKCTASGRQYLEVPSRFSTKTCSPSGQVSGRVDVGVGRMAALQTGELGLRTAVPLINVRTPRTGPTGVAGVHKEDRDACALGFVGDKVTQLGKAPTTMLVALAFANRRPAADVRQVFQHKRGLRVCGAGNKVFGDRMIDPTTKPGFCVGQLLESPLGRCGASGLVGLPCSSATHAHTLHRSTRVGVPIGARLRAAQSRGLRPKSAWVPSVALPACRWSATRRTVHAPRPDRLARGLWKTAPVDTRPSASGQSLGPGASSG

SEQ ID NO: 156 - protein, 258 aa, synthetic construct
  REGION 1..258: note = Synthetic
VFPALTDKLNSIPLPDPIKAPVGNRIAVPYLKDVRFHKQALPEGKIKCGRIVKRASGWYLCLFIDAEPNVILQLASNSIGIDSGFKHLLSLSNGEKVDHPRELEQSAKRLAQAQRGINRKLVARINERIANQRKDRNHKISRKLVSENSLIAFSADNHKGIASKFGTSVASSGHAQLRQMLAYKSIASGRLYVEVDNRNSTRTCSACGALTGPRGWAGLSVRHWTCGCGASHDRDTNAAINTLMLGMERASNLEKRYA

SEQ ID NO: 157 - protein, 376 aa, synthetic construct
  REGION 1..376: note = Synthetic
SIIHKLYPTEKQKAYLNDCLFSAVGIENWCITQIKKEHEYGFPLARMKPLQIRSILSKKIEGHSKKSGLPSKLLNDCIAAVCESFKRHKNIHKLGFKSIRKKKSFYFNGDIKISKEGRLKLPNIKTTFKMSEMNKFQGQLKKVTLIRKFNGWCACCVYDESRKPIEITDSKEAGIDPGLKTSMTFSDGTEIQFPKFYQKSQQLQAKLQRKSKNSKKVKRLQAQTANKRKDHHHKLSTTIAKEYQKIYWSNDSFKGLIQMFGKSYANLALGKFRDLLTNKLASRIDGFGELIKVSNRKSTLTCSACLSLTGPTGWSGLGVRNWVCSSCGAAHDRDVNAAINTLISGQGLSAVKGNQVNRNFTGTDADLSVSRVPVAC

SEQ ID NO: 158 - protein, 291 aa, synthetic construct
  REGION 1..291: note = Synthetic
DARGRIYCTPKEFQNVLPGTSKSLGIPTPPIRGMLALAYQSWQRCYKKPRHKGRRNRLNSIPFPDPVIYLPVEGRIRVPGLGMVQYHKRDVPRGKNKNGRIVRRAFGWYRCMFIDAEQKAIPATGDGAIGSNPGFKHLITVCTGERVDHRKELQASLGRAQRGASLKERISNQRRQRHHHLNRRAVEENAVIVFSKDNLRGLSRADFGKSVAAAGGGQLRSIFDYKNRAGGRQYDDVSGKGSARTCSRCLAPTVPKERARLSVMQWPHNSNINAAVNSLVAGVATTRERSF

SEQ ID NO: 159 - protein, 392 aa, synthetic construct
  REGION 1..392: note = Synthetic
ARRVKLRLNQAEEARLEAWFAVGTGVWNWAFGHYLRADRDWVRGCRLTPPPAWAPGAKSPQWVQAMPGGVGPSAFALHAQLNGVGARLGVNQHFLRGLVDDVAGAWADYRAGEKGRPKRKGQRNRLFSLPFKSGVKLLDAKHLRIPSFGVVRLHDQKDLPALCGLEVGVNRIKCARLMRVRRGWYLTLFIDAPPRTVTVVDHAVVGVDLGYSTLAMLSSGEKIPHPREYQRAERRIGQAARGLNLALLGALQQRLANARRHRNHEISRDLVARHATIYLSKDNLKGLQRTFGKSVLSAGHGELRGMLASKSRQAGRVYVEVSSKQSTRRCHCCGALSGPHGVAGLSVRVWECVACGARHDRDVNAACNALLTGIGSMPQPGAVLALETAGNG

SEQ ID NO: 160 - protein, 394 aa, synthetic construct
  REGION 1..394: note = Synthetic
LVRSLKLKVNKSQEKYLNRYLFHLEGVYNWAIRQIKFNSANGIYLSHYDLQNATSNHAKKIEIHSQVFQATLKQAWSAWDRCFKKLGGQPRLKSRYRRLESFLFPQILERNHPIGNQIHLPGGFNFKFFKQDIPEGKIKTARIQKKSSGWYLNLTIDTNHKITNLKDTEEAVGVDTGFHHLAILSNGIKYENPRELKIGAKCLAQAQRGHDKKLVARLHEKQSNKRKDRNHKDSTEIIRNYKTIYITNDNLVGQAKKFGKSVTEAGIAQLRNFLLYKGLNSGRVVGLVESHYTTMTCSCCGSLTGPTGLKGLAVRDWVCCVCGTHHDRDVNSGQVVLKIGVGTALALTIGVQPSVVDLKQKSFGRRKKSMSGVGGSTANLNSPVCLGIPERCEE

SEQ ID NO: 161 - protein, 377 aa, synthetic construct
  REGION 1..377: note = Synthetic
IARHVKLKMNKKLKKQLDSMLWHLTGVYNWTIKTVESRKLSGLPYSEFDILNLIPNHSKKCGVSSRALAGTINDAYSAWTRCWSKQNRKPHLKSNRNRLSSILHRGDCKLNILESKVKIPVLGWLKLHSLTKGLPEGKLASSVRLIKKASGWYAVLLFEQDHEQKLNDTDSVIGIDTGFKHLAILSNGQKFENPRELEASSKQLARVQRGRHKRATACLQERIANQRKDRNHKISHDLIRDHAQIYITNDNLRGQAHKFGKSVTGAGTAQLRNFILYKGSSCGRTVKLVESRNTTLTCSGCEAHTGPSGLSKLNIRFWVCEACGASHDRDVNAAINVLNTGLRYSLEASKDAAEPEKVKSLKKLGLSSQNCPGRAVI

SEQ ID NO: 162 - protein, 368 aa, synthetic construct
  REGION 1..368: note = Synthetic
SVYVHIAKQPTGIKREMLVRILKLKLTRKQEKTLEQWLWHLTAVYNWGLKKIELNAKDKIYFSEKTFQNLLADHGKKIGIPSHTIQGTLLQVYNAWQRCFRKQAKKPHLKGQHNKFNSIAFPDPIKPPKGNKIGIPGLKKVRFIKQKLPDAEIKCGRIVKRASGWYLCLWLDTERSFPVKDTDEAVGIDPGFDTLLTLSDGTKIENPRELHKGAKRLAQAQRGHKKQLVARLQERQANRRQDRNHKVSRKLVENYKTICYSDDNFKGMASNFGKSVSEAGLGQLVKYITYKGSICGRQVIPVSSKYTTMTCSVCGALTGPTGLDGLKVRHWICSACGADHDRDINSAVIVLNAGLGISHERKAIQCVA

SEQ ID NO: 163 - protein, 593 aa, synthetic construct
  REGION 1..593: note = Synthetic
MVRCYRYCLNPSATQIAAIHRAAKAARAYWNGLVAVQRWAEREIKAGRQGSVVAEYEELLQGKALTGRAVSVARARAASDGVPVEDAISSLRSEKAAELGTIVRRKDGTRNRWLSRRRLAVEYACERIERTRKLKVSRLPAAVAYAMLQKFQAATAEYISGKRKRPRFKSFGDAISLQAQVTATTPWPLASGGHGETFVDLARIAGKVCGKVPVVFHRDLPAGAKIKQLALTTRGERMFAVLMIEALDAVLERQFPDAGSRVAGIDPGRKVALSLSTPDGNETAVIQPALAKDKWFLRRLRRGQRKADRQRRAGNPGCFDAGGRPIKGKRLSPPSQNLQATQRRIFEMQRHMADARLDFYHRSANYLLERFDAIGVGKWRGRGKAPGKGKARRAQNRKDYDHAISLFAGILRYKGGSKKQTFDVAEHGSTRDCDGCGEPTGPRGLQGLKIRKWVCSNCGAVHENRDFTAARAIARRTAEKLAAEAHSPCSQPARKGGEMQRRRSADAGQTKVVPPEGAGVPVVDEAQAARPVARKLTPSAASAAVPGQFQGGARASLGAVAPGDSNIILAWSRPATGPKARGPLAECAVDDSN

SEQ ID NO: 164 - protein, 482 aa, synthetic construct
  REGION 1..482: note = Synthetic
PQTITRCYRYALAPSAVQREAIFAAARVARRYWNSLVACQRHALHEIEHGRRGSVASALTELLLVKKLTGGAVVKARPRAETDGISLEQAAHLNRIDQSREASKCEYTKKGFFLRKEVQSQARHRLRDRKCRSNPQEKRRVQNRNGARADKKVPRLLSVLHHRQARGTTIQADRRFYFAAVPAQHGSSNPISGDRVRLDKLAGDMCSAAPAILHRPIPETATIKQVALTIRGPRMFAVLMLDLVGQDRQYAATGQVAGIDPGRKMALSLSNPDQTVTERMQPPLARHSHVLKRLRRLQRKAARQLRAANPDCFNADGTFKRGKRPKNKSNNFRRASQQVLDAQEHIANARSDYYHNAANQLLSAYDVIGVGTWRGKGNAPGEGKAKRAQNRKDYDHAISSFVSILEYKADECGKQVFDVPEHGSTKRCSYCRADTGPTGLEGLKVREWTCRECGPHHDRDFQAAAEIARRAQRMAGANSRPR

SEQ ID NO: 165 - protein, 519 aa, synthetic construct
  REGION 1..519: note = Synthetic
KTLAYRYRLRLTPAQEDILDPSQEQLRLVWNHLVRSQRHAEREWIHGRAACVKNELLDLSLAKEARGTAVVSARKLAEERKVPLEEAMQIRRREYVEKVASIPTRKKDGSRCLVIARRKLAVAYADALVNSKYDNYFGLRKGIYQRLRDKFAKCSAMWLKGKFRRPRFKRKGEPVALQLQIFYGRFALKRFSDLSAFGGQALKKCEVIIHRPLPDSAVIKQIAIAGKRDARHLIVMFEAAASDVAKNFPATNRTAGVDPGIKIALTITPLDSPDFGASDHIEKQPQLARDERFLKRLRRVQRKLDRQRRKNNPDCFDKEGRWIKGKHDNVKSENMKRTQARMTRMQTHLAEARRDFYHNAACEILRSFDNVAIGKWRPAQTRRSKPSTPSPKGLGAARRAINRISYDHAISLFISYLKDKKERSTTPKEIQDVGEAFTTRDCPKCGKPTPKDLGEREWICPHCHTMFHRDAAAAWMIAKKFKAEVASTSQPVGVARHHKFSVGANVTGIKPPLPTKRFP

SEQ ID NO: 166 - protein, 435 aa, synthetic construct
  REGION 1..435: note = Synthetic
VSASKAMARLKREQDSRIWGLGKFVLAQWYAIALTNHYRQRKTGIFLGSLFAQVVSSFEDACKARARSKFRNRLRLKRTNDPTTCRVQFRRDPFRYAEPRGKHQMNWIDLGALLPLSCRRALRWVPVRQHRPLPLGNKVTQIAITRDRISWHALVTIQCDKALIAKQYPEANGRIAGINPSRNVAFTVVPADSPDFGQSDGRMFTAPSDQKKLLKRSAKLMRKANRQRRAANPDSYRPDGTIIKGCLPVRTSRNLQKTLCQLAELHSRFKAIRAETYQLTADELLSQFDTIRIGSWRGLNPRKKSDAGSNREGKPRAKGKAALERRRNQLDAAHAFSDFKRILREKATKSITPKKIEENEESFTTRICPACGADTGPRGESDLSVRVWTCSECGRKWQRDKAAAWHIAVDKLKDKQYKKEPAAAHAVRAEDSAKG

SEQ ID NO: 167 - protein, 688 aa, synthetic construct
  REGION 1..688: note = Synthetic
HLLNYKYEIFPTKPQREQLNRTFRQTKIQWNKAVTIRKKLKSALMSGQFEHVIKTYLSAAADKSNTSSNRKKAILKVQQSLPQIDFETAAKLYDIKNLVGKVLGELTPRHADIAFLVNELKTSHSKELAERKAAIANGATGKSLPKLKTYWQMITAIGQLAGFKAKTFMDDSFESPSGMALSAIRFNVSGTKNAVRWNQAVQPKPGQRTYGATGEPRYKRRSDGFAYQIHDAAPADLIRSKKKNGHQIHLKALHKGNAWVDFAYHRPVPVDGKIKQFTVMTKAGRYFIALSTEVPTSAWAIAPMEAGWHAGIDPGAQTALTVGLVNSTSGEIKHLAIHYEFLEKSLTKLETLQQALSLKQGPRRKRTEVEIQEALTQYSKKRAVQKLTNAEKEKTLAKERERLERRMVFQGASRKWRQGAKSVSSLMLKIANQRQDVLHKISRALAEGCDVVGIGHWEPEREVSFRKKLRLLKKQVKAGVAGATATLKEHIEEKSKEGPKGIKKRRRGGRDRSIATLRMLINEKAVRSGVKAFTDINESYSTMTCSSCGEATGPTGIVNLGIREWQCGNCNVSHHRDLNSAFNILKKTELELAAAQAAAPATGSTATRTDAQGAQSTPGSDSGSGYLATGHHGRGGSFFYEHAEVSLPDLWKEEVPRALKSLIQMGVVRALTLQRADEKSSKSPPAQT

SEQ ID NO: 168 - protein, 522 aa, synthetic construct
  REGION 1..522: note = Synthetic
NHLNYKYAIFPTTPQRRHLGRQMRECRVQWNRAVATRKRVKASLQCFKAEPVLREVLSIQKDNSQGLRSKAINRLREAFPNCDPKDLPMLYDLRKIFGNAFAITAEHLDLGQLATEIQPMLREELTANRAYWRLPEKDRAKLPPKRPIYYKLLSAASNFAGLEAQRYMNKAFVSQRTIARSVVRFTVSGSEGKSRFEDACSPSPEQRKIGHPGEPRRKRRVESFGYQETGEVLDGDQLTVKGLPGGMDRVRVLLHRPIPEASKLKRMTLMQEGRQWYAVLTLEVPDEVYRLEPKNPDLSIGLDPGAVSALTAAIVNEKQDVVTYEKFDWRPLEENLEKLVLISEQLSRMQGPDRRKQQRASKRWLKLNARRRRLHGRIRNQRRDVLHKLSRHLADHGFIAIGHWEPLRKVTGRADFKEGKTETVEAGPKGVVTIRREGRDRSVATLRTLTAEKADRSGVQVITHAEEYNTTRRCSACGELTGPKGDPSIREWTCSHCGAEHDRDQNAALNILMLALEGQVQP

SEQ ID NO: 169 - protein, 382 aa, synthetic construct
  REGION 1..382: note = Synthetic
MILVYRYRVKSLNGLLNQQARAVNFVWNFCNDRQKDALRFGRPWHTGFDLNKLTTGSSKELGLHSGTVNAVCEQYAKSRSQKKRPYLRYRGKKSLGWVPLKGRELKREGDAFRFAGHTFRVFNSRVLPVGKIKDGTNFSRDSRGNWFLNIVIDVEVVAMGVRQPVKGVGIDLGLKEFATLSTGEKIEAQRIYRGAEQALAVAQRAHKKRRVKVIHAQIANRRNDFHHQLSTRIVREFDYIAVGNVCAAGLAKTSMAKSVLDAGWTSFRTQLAYKAVKHGAWFEEVNESYSTQTCSDCGALPDSRPKGIAGLGIRNWICSECGGVHDRDVNAAKNILNQLSFRVGHDTPVVGIPFLLGGEDVKKKPPARCAVAVLQQGASRKR

SEQ ID NO: 170 - protein, 505 aa, synthetic construct
  REGION 1..505: note = Synthetic
TNMKLVYRYRVKSLTGLLNQQARTVNFVWNYCNDRQKDALRFGRRWHTGFDLIKLTTGCSKELGLHSGTINDVCQRYATSRAMSHRPYLRYRGCKAMGWVPLKGRELKREGNAFRFAGRTFRVFYSRPLPDGKILDGTNFSRDRRGNWFLNIVVEVEPAPVRAPVRGVGIDLGLKTLAALACAQRARKKRRIKAIHAKIANRRLNFLHTRTSAIIAAFDYIVVGNVNAQGLAKTSMAKSVYDVGWSSFLTQLAYKAVKHGAWFEEVDERFTTQVCSHCGALPDTRPRGIADLGVREWCCSDCGVVHDPLFRVERTSMFDTAFRFNDGFFFQDRFDGQVLALGIELLAHRFEQVERAVGVGGIVGGQLVPAGLDAGGRFADGGFDQIHVAAARGHKAVDHGGFVVGDVVPGLFLIVPRFNDGDVDPVRAWLAFEVEGHAAFVAQHIADGAGHHHQLAFERGPLVQALLAGGDIGMDGRRQCQREGECARCEECFHLRLGGVSILVG

SEQ ID NO: 171 - protein, 470 aa, synthetic construct
  REGION 1..470: note = Synthetic
LNKLTTGSSKELGLHSGTINAVCEQYAKSRAQKKRPYPRHRGRKALAWVPLKGRELTREGNAFRFAGHTFRVFHSRPLPDGKIRDGTRFAKDRRGNWFLNIAIEVPAAPAIAPVRGVGIDLGLKDFAFFSDGTRIEAQRIYRDAEQQLAVAQRANKKRRVTAIHAKIANRRRDFHHQRSARLVRDFDYIAVGNVNAAALAKTSIPDRARLSDGAGLSVQPADGRLAFRTERRHGGDGGPVLERAHSSCGNLPPMYHGHRTGSAAGAGPAPVPSSTIKRRHEHPQPGLSVPSAIRCRHRRIEPCAWRRRDRAAQSDRRRFCRRDLAGKSEVHGTRRLAGLCQRGGATGRPGPGRHLHAGCNRRRDHRATRRARHQGGDRAHRRPECLEGCGRHQHAGRDAGGGQAISPAYPRLELRWSPGAGHRPQCEFCAYWRAARQDRVRVAIGCAGDRRARLGKVAWHRVFEIHFAGR

SEQ ID NO: 172 - protein, 205 aa, synthetic construct
  REGION 1..205: note = Synthetic
LPRGDDLCVGSTFRVFNSRPLPEGKIKDGTNFSRDARGNWFLNIVIEVADTRARSLARGVGIDLGLKDLATLSTGEKVANPRHLGQLEQALAKAQRARKKRLATNLHARIANARRDFLHKLSHRIVRDFDYIAVGNVNAAGLAKTRAWRSPSSMRAGRPSAQCSRTRRLRMARGTRKSTNVSPPRFVLRATRCRRRGRKVSQTLE

SEQ ID NO: 173 - protein, 437 aa, synthetic construct
  REGION 1..437: note = Synthetic
VADGVRLNVLTTGSSKELGVHSGTVNATCEQYAKSRSQHRRPYLRYRGRKSLGWVPLKGRDLKREGDAFRFAGHTFRVFSSRPLPDGKIKDGTNFAQDARGNWFLNIVIEIPDVQARPIRSGVGIDLGLKDFVTLSTGEKLPSDRCGRRAAEKLAKAQRARKHKRHIAKLHAKVANARADFQHKLALDLVRRFDYIAVGNVSAAKLARTRMAKSVYDASWSSFRNRLRYKAIAHGATFEEVDESGSTQSCSACGSKASTTRPKGIAGLRIREWKCSNCGVEHDRDINAALNILRCGRASPGVGITSHLGRRGRQGSTLHYQDRGTGFSYLWDAAMWAPQIDALSRKYRVIVPDLWGHGASGALPEGTQTLDDLAAHASALLDALEIERCAVVGLSVGGMWGARLALREPQRVRSLVLMDASLEAEPDATRLRYFGML

SEQ ID NO: 174 - protein, 350 aa, synthetic construct
  REGION 1..350: note = Synthetic
MILVYRYRVKSLNGLLNKQSRAVNYAWNFCNDTQKHALKWRKKWPTGFDLNVLTTGSSKELGIHSGTVNATCEQYAKSRSQHRRPYLRYRGKKSLGWVPLKGRDLKREGDAFRFAGNTFRVFNSRALPEGKIKDGTNFAQDARGNWFLNIVVDMPDVQARPIRSGVGIDLGLKDFVTLSTGEKLPNDRFGRRAAEKLAKAQRARKHKRHIAKLHAKVANARADFQNKLALDLVRRFDYIAVGNVSAAKLARTRMANSVYDASWSSFRNKLRYKAIAHGATFEEVDESGSTQSCSACGSKDSTTRPKGIAGLRIREWACSDCGVLHDRDTNAALNILRCGRASPGVGIFRR

SEQ ID NO: 175 - protein, 356 aa, synthetic construct
  REGION 1..356: note = Synthetic
MILVYRYRVKSLNGLLNKQSRAVNYVWNFCNDTQKHALKWNKKWPTGFDLNVLTTGSSKALGIHSGTINATCEQYAKSRSRNRRPYLRYRGMKSLGWVPPKGRDLKREGEAFRFAGNTFRVFNSRPLPEGKIKDGTNFAQDARGNWFLNIVIEMPDVQVRPVRSGVGIDLGLKDFATLSTGEKLPNDRFGRCAAEKLTKAQRARKHKRHIAKLHAKISNARADFQHKLALDLVRRFDYIAVGNVSAVKLARTRMAKSVYDASWSPFRNKLRYKAIAHGATFEEVDESGSTQSCSSCGSKDSTTRPKGIAGLRIREWACSDCGVEHDRDTNAALNILRCGRASPGVGILPLKEMRAS

SEQ ID NO: 176 - protein, 241 aa, synthetic construct
  REGION 1..241: note = Synthetic
MILVYRYRVKSLNGLLNKQSRAVNYVWNFCNDARGNWFLNIVIEMPDVQARPIRSGVGIDLGLKDFATLSTGEKLSNDRFGRRAAEKLAKAQRARKHKRHIAKLHAKVANARADFQHKLALDLVRRFDYIAVGNVSAVKLARTRMAKSVYDASWSSFRNKLRYKAIAHGATFEEVDESGSTQSCSSCGSKDSTTRPKGIAGLRVREWACDGCGVVHDRDINAALNILRCGRASPGVGITCL

SEQ ID NO: 177 - protein, 397 aa, synthetic construct
  REGION 1..397: note = Synthetic
MRLTFRYRIKDKHARRLNEQARAVNFVWNYCNEVQRLALQRNLKWPTGYDLWKLVAGCTKAGLDLHSHSAMRVCLQYEKSRRQHRRPWLRWRSKRSLGWIPFNTGHVQFRDSSFVFRGERYDVFLHRPLPESAKIGAGSFSQDTRGRWYINCPVEVAEATQAPLKRVGLDLGVKDLATLSTGEKIEMPSFYRKSEEKLAKSQCARKTKRVCAIHAKVANRRKDFLHKASNKLARKYGLVVVGDVSPSKLAQTDMAKSVLDAGWSRFKDMLSWKLRLRSGGMLLEVSERFTTQICSECGCVPPSRPKGIADLGIREWTCSVCGTRHDRDVNAARNILRVGLHTLVEGAHPSCLKFGSHRLQAGEQSLGGGAVSAQTVAGPQHLRVGFAYMIPAWSSRG

SEQ ID NO: 178 - protein, 363 aa, synthetic construct
  REGION 1..363: note = Synthetic
VILTYKYRIKDRSAKKRLREHAYAVNQVWNYAVAQQRDTEGRYRAGAKPRRWASHFDLQRLCKGVGKELGLHQQSVGGVCKTFSQARDKLKHAPRFRASFGTKKAVGWIPFESQSRQIDGNSVVYLGKRYRWFGNKRRPLPETAKGGAFIEDALGRWWVCFHVEVPDNVLIGNSEIGIDLGLKTLAALSDGLKIENLRHRATWAQKLARAQRARNKRRTAAIHARIANARKDHLHKTTTELARSNALIAVGNVNSKRLARTRMAKSVLDAGWSTFRSFLRYKSPGYVEVDERFTTQMCSCCGSIPGSSPKGMGALGMREWVCSECGERHDRDVNSARNILKLGRSAAPRVDESRSNTMGCANV

SEQ ID NO: 179 - protein, 253 aa, synthetic construct
  REGION 1..253: note = Synthetic
VPFQKQSRQIEGNSVWYLGKRYRFFGGKRRPLPNTAKGGMFVEDSLGRWYVCFHVEVAKRLPQSNGAIGIDLGLKSLAVMSDGCKIEAPQHYRKLETKLAIAQRAHNKQRVHKLHTKIKNCRRDFLHKLSTELADQNALIAVGNVSSKQLAKTRMAKSVLDAGWSTFRSMLKYKSAGYVEVDEKFTTQTCSECGALPPERPRGIAGLGIRQWECSSCGASHDRDVNAARNILAAALSAQRPVEGSRNIALIGQ

SEQ ID NO: 180 - protein, 387 aa, synthetic construct
  REGION 1..387: note = Synthetic
MILTYKFRIKDATAGKHLARHAIACNQVWNFCVATQREAERRHKGGMNVRWPTAFDLINLCAGSSKELGILADSVCEICRRFVNARNASRRCPQFRSSFGSRRALGWIVFKAKRGHRVSGDRVAYCGRNYRFWKSRDLQGTPKVGAFVQDARGRWYVCIQCEVTDTLPTGSGIVGIDLGLKSLATCSDGTEIPALRHFRLYEPALAIAQRSRSRRRARAIHAKIANSRNHHLNEWSARIARENRLIVVGDVSAAKMKKTRMAKSVSDASWSMFRNQLRYKASRHGAVYIEVDERGTSQTCSACGTIPTSSPKGKGALGMRSWECSNCGASHHRDVNAARNILWIGLECQPPGEGIANLSRDDINKGVPQISIGRAALSAPSTEKGRG

SEQ ID NO: 181 - protein, 354 aa, synthetic construct
  REGION 1..354: note = Synthetic
SFHIKTFQFRIKDSNKTKQLSALASKVNFVWNYCREQQLWAISRGRKLLYTSDFEKLTAGASKELGLNSAVIQAIVKQFVKSSTQHRKTAKWRSYKHNLGWIPMKNTAIAVNNDTFKFNGIKFNFWKSREILGNIKSASISQDSQNKWYINITTDYQPELYSGDGIVGGDLGSKDLLTLSNGVKYANPKYYREYQRKLANAQRYKKSKLVRKFHKKIANSRKDYLHKITTQIANDNKIIVLGDITSKNIAKNHRLSKSVYDAGWFMLKTLLGYKAIERGSVFLLVNEYNTTRLCNVCKVVDANSPKGISELNIREWKCKGCGTTHDRDVNASLNILAIGLNSLANKTTSIQKLS

SEQ ID NO: 182 - protein, 251 aa, synthetic construct
  REGION 1..251: note = Synthetic
MKNTAIAVNNDTFKFNGIKFNFWKSREILGNIKSASISQDSQNKWYINITTDYQPELYSGDGIVGGDLGSKDLLTLSNGVKYANPKYYREYQRKLANAQRYKKSKLVRKFHKKIANSRKDYLHKITTQIANDNKIIVLGDITSKNIAKNHRLSKSVYDAGWFMLKTLLGYKAIERGSVFLLVNEYNTTRLCNVCKVVDANSPKGISELNIREWKCKGCGTTHDRDVNASLNILAIGLNSLANKTTSIQKLS

SEQ ID NO: 183 - protein, 356 aa, synthetic construct
  REGION 1..356: note = Synthetic
MIKTFSYRLRNDPLLNQLAHRVNLIWNFCNDTQKFALKHKKKWPTNFDLINLTSGTSKELHINSQTVQLICDQYYKSRTQSKKPYLRYRGDRSLGWIPFKAQSITELSDGFLFMKQKYHIWKDRELPDEYILKSGSFSQNSMGHWFINITVEIQPKNEYGNGTKSIGIDLGLHTLATCSDGTKIDTIKFYQDNEKKLAKFQRAKKKKQVRNLNKKIQNRRKDYIHKQTTRLVNENAMIVVGDVSCKFSISQNAKSTLNVGWGLFRSLLTYKAIARKCEYIEINERYTTQTCSSCGVIPKSSPRGAKGLEIREWTCDECGIRHDRDVNAAKNILRLGLQSLAEGISEIDVRSKELTS

SEQ ID NO: 184 - protein, 353 aa, synthetic construct
  REGION 1..353: note = Synthetic
MIRTYRYRIKDANVIARLSAMAGAVNAVWNFCNQTQKFALRWRKQWPGYATLCALTAGSSKALGLHSQTVQAVCEQYVTARQQHGKPSLRWRASRGKRRSLGWIPFKAAGIKTEGAGIYRYWGLTLKCWHSRDLPDGAKIKTGSICEDATGRWYINLTCEVPDQTVFPSKNAIGIDLGLKALATMSNGDQLPQSRFYRDLQPKLGVAQRARKRARVAAIHRKIRNRRRYALHKATTQLVKDNGLIVVGNINASAIAKTKMAKASLDSSWTSFRDMLRYKAMAHGAIVMEVHEAYTTVTCSVCKNRTGPKGLEGLRIREWTCSECGVTHDRDVNAARNILALGHERLAEGIPAL

SEQ ID NO: 185 - protein, 406 aa, synthetic construct
  REGION 1..406: note = Synthetic
DKLLITYQYRVKDSNKKLVKSLMHKSGLVNLVWNYCNDIQQQAVKRCRPWLSAFDLSNLTSGTSKEIDLHSASIQAVCEEYATRRSQFNKPFLKFRTNKKDRSLPWIPFKASAIKVDDKGTFSFMGLKLKTWYSREIDKRAVLKTGSINRDSCGKWFISVVCELKFNSKEEQENYQLSLTSKGQNLTAIDPGLNPMLTFSIEQPDGSVIYKEIEPQKYYKNLQDKLAKFQRAKKKKQTKILHKKIKNKRKDFNHKLANEIVRENHTIINTDLNISKLKKGKLKGHAKAWSDIGLGELRITLRTKAKKHNVKYIEVSESILKSTQTCSCCKAMTGPRGRKGLGVSSWACLKCGRHHERNQNSADNHRLAYKESLRDDSKILPQKELKNKVSLTILDKECPQGESPSL

SEQ ID NO: 186 - protein, 344 aa, synthetic construct
  REGION 1..344: note = Synthetic
MGCAVNRIWNNANETQQLAISSEHKWPSSFDLNNDTAGWGKHLNIHSDTVQETNQQYIKSRTQFKKPYLRWRSNSKSLTWVPFKARAIHVDFTLGSARYLGINFDLFYHRPLEGTVKTGSITADSRGRFYLNLVCELPDFVGPTGNHKVGIDLGLKSVVSLSDGISVESPKYFRMMQNKLAKAQRAGKKKQTRNLHAKIKNQRLDFNHKLSNTLVNSYDVLYVGDVKSSDIIKTKSKGMAKSVNDVGWFQLKSFLLYKALARGKVCQEVSEKYSTQTCSECGTISTASPKGVAGLNIREWTCAECGVSRDRDTNAAKNILRSGTRSLPSKNLDTKLSLVGSPGL

SEQ ID NO: 187 - protein, 382 aa, synthetic construct
  REGION 1..382: note = Synthetic
PNVIRTLRFKLRREGVAWLEAAAVEVNQVWNWANEVSYKAARPYSGPSRWLSGFDLDKLSTGATKCFEHVGADTIQKVDAEFARRRRQFRKAKLRWRVSRGSRRSLGWVPFKAASIRRNGRALRFCGKTLRVFEADRFLGIDRWRDGCFCQDAVGDWWLCLPAPVVIEDIPAAEVDVGIDLGLHATATTSDGAVLDAGRAYRDLEQKIATAQRRGHKRHAKRLHRKASRRRAFALHRFSRKMANTYQMIVVGDVSSPKLARTRMAMAILDSGWGLLRMQLQYKGESAGRCVRIVSERNTSRTCSACGALSGPAGVNGLRVRLWVCGECGCAHDRDVNAAKNILAAGRCSPSVCGNESSPRHAPPSRTPRPRKARKARDGAAA

SEQ ID NO: 188 - protein, 324 aa, synthetic construct
  REGION 1..324: note = Synthetic
TTYMTTLHLKVRAEAWPWLDQASREVNVVWNWGNATSAKAARPFAGKAKWLSGFDLDKLSAGATKCFDQIGADTIQRVNGEIATKRRQAQCAKLRWRISTGSKRSLGWVPFKAASIKRTGRGVTFCKKSFRVFEAERLEGVTFADGSFAQNALGEWFLNIPVKRPIVRDVAPREAVGIDLGLKRVATTSDGALLDAGAFYRDIEDKIAQAQRRGHKRQAKRYHAKAANRRLDALHVFTSSIVKDYQHIVVGDREQPEAGQDTDGEVRAGRRLGDAQDAAAVQGPSGRSQRRDRQRKKHHASMFQLWPAHRPQRSKAARCKGMDL

SEQ ID NO: 189 - protein, 374 aa, synthetic construct
  REGION 1..374: note = Synthetic
TVTLHLKVQPNAWAWLDQACREVNTAWNWANETSRRAIQTYDDGGRWLSAYDLDKLAVGAGDCFERIGSDVIQRVNAELVTRRIQFRKPVLRFRASGGRRRALGWIPFKAANLRLKGNRLRFMGKSIRLFEMDRFLEHRLMAGAKLGSGNFAQNALGEWFLNVPVQMPYPAGTTFDANGIPQLPVAPIECLGIDLGLKAVVTTSEGQVFEPNRSYRDNEAKLGNLQRAGHKKQAKRLHQKIRNQRQDYNHKLSSALVSQGQWIKIGDVSTAFLGAGTRAKSARDAAHGQLKAFLHYKGHRAGRSVDVVDEKYTTQTCSACLSRTGPKGSTGLRVRQWICSACGASHERDINAARLIKAAAPRCRRPIAGTRELR

SEQ ID NO: 190 - protein, 479 aa, synthetic construct
  REGION 1..479: note = Synthetic
TVSTITLSSKVRHEAVAFLEQAAREVNQVWNFCNATSYRAYYGRYGGTAKWLSAFEMNDLLVGCGEVFGKIGIDIAQAVASEHAARRSQFKKSKLRFRKSGGAKRSLGWIPFKANNLRFGLFDAMGKQVRLKGDPQPVVPAWPKRVDTPELSEAENKAAYAKIRKEFEATREAAEEALLAWEYRKIQAAHTIKLSFMGKTFRLFNGQRLVKAYRLAKQGVGALRSGNFSQDSLGDWYLNVVVDIEEVQLVPLYGEDSFQGLDPGQINALTGSDGRTLRSRRYRDMEPKIAQLQSRGHKKQAKRAHRKAKRQRQDDQAKFVRAAVDDYARHWVGNLSPEKLKQSKLKGQAKSISDSAIGAVTTTLTRIGHRAGRVVEKVNEAFSTRRCSNCQSLSGPTGLDTCVVRAWTCTGCGKRHNRDRNSGVNLSHTGELDWNASSPDDRRTFLPEPRYGKREYILASAPRHRHACGGKTSAQHPTS

SEQ ID NO: 191 - protein, 348 aa, synthetic construct
  REGION 1..348: note = Synthetic
IRTLKVRIRDKHAVRLCRMARSVNTVWNYANAYARHEWKAKRRFVSYAGPRGLAEQTRGVAKDLGLHSGTVQKVCAQFDTSKHQQRKAWLRFRGRKSLGWIPFKGAHLELEDGGFRFMRQRFQVWDSYGLGRFTARDGNLVQDPRGRWYLCVPVEMDGLELLESGQAVALDLGLKDAAVASDGQKLKAKWYHGIQAKLGVAQRARRSQRVKALHAKAKHQRQDALNKFSTALVRQYGAIFVGDVCTAFLLKFSPKSTLDAGHGILKHQLRYKSLQAGRKFAEVSEQWTTQTCSACGCTAGPKGRAGLNERAWVCPGCGTSHDRDVNAARNILALGLGHGPPVGGIRPL

SEQ ID NO: 192 - protein, 356 aa, synthetic construct
  REGION 1..356: note = Synthetic
MNHTRTLKLRIKDKHAKTLLAMAREVNLVWNYCNETSHRAIRERHQWLSGFDLQKLTNGLSKCDGVQIGSPTVQQVCEDYAKVRKQFKRSRLNWRVSSRSNPKYSLGWIPFKARALQYKNAQIQFAGFRFGLWDSYGLSQYALRAGSFSEDARGRWYLNICVQVQSKLCIGTAAVGIDLGLKAAATTSEGQVLIGRQYRTLEQKLGIAQRAGKRARVRAFHARIRNRRKDAQHKFPTALVERCAAIFVGDVASARLVKTRMAKSTLDAGWGQLKTMLEQKCQRAGVVFEVVAERYTTQTCSCCGSISTSSPKGRAGLRIREWTCVCCGTAHDRDVNAARNILAAGHRRLAVGIPAL

SEQ ID NO: 193 - protein, 346 aa, synthetic construct
  REGION 1..346: note = Synthetic
STCIKVLKVRVKDRHAPLLRSMATEVNQVWNYCNDLSDRMIRERGRWMSGFDFSAYTAGASKQFEHIGSSTIQEIAEHYASKRFSAKRRKLRWRKSFGDKRSLGWVPFKARAAHWKHGQVFFAGSHFKVWDSFGLANYKFRAGCFTEDARGRWYFCICVSVDRTCPKGQDSIGIDLGLKTVATCSDGTVLEGRWYRHLEGKLAKAQRARRKRRTRAIHAKIRNRRADALHKFSRHLVNRCGEIYVGDVSSSKLTKTTMAKSVLDASWASFKTMLDYKSQQAGIVYREINEAYTTRACSECGGLCGPQGIRALSVRDWQCVECGVQHDRDVNAARNILRLGAGHCAP

SEQ ID NO: 194 - protein, 350 aa, synthetic construct
  REGION 1..350: note = Synthetic
PKLVKTLKVRVRDKHAPLLRAMSREVNFTWNYVNELTSRMIRERHRWPSAFDLAPSVAGASQCFEHIGSTTIDEVCAVHAKSRKQAGRVRLAWRVSNPKSRRYSLGWVPFKSRGARWRYGQVHFAGHAFKVWDSYNLAAYGFRAGAFVEDARGRWYFTVTVEVGASCPAGVRHPVGIDPGLSNSATASTGLKAPSRRYRELEDAIGMQQRAKNPERVRALHAKVKNRRNDDAHKFSRAVVDGASVVCMGNWKPPASGRSRWAKSARDGALATLKGMLRYKCEHAGIPYQEVDEKMSSRTCSGCGAVHDSPRGRAWLGVREWECQHCGVVHDRDVNGAINILVSGVGHGPQ

SEQ ID NO: 195 - protein, 396 aa, synthetic construct
  REGION 1..396: note = Synthetic
VLHLRLKDRHTAQLLKMAADVNFVWNYCNELSFKVWERERRFMSGFDFSPYTRGASKEGLSIGSAVFQEVSEEFAKKRRAAKRVKLRWRVSRGSRRSLGWIPFKARSLSYKAGQVSFQGMKLSLWDSYGLADYELGAGNLCEDSRGRWYLNVCVKVKKETLPRPAAEVKVDAVGIDLGLKDLLTTSEGERVPAQRFYRDLEPRLAVAQRAGRKQRVKAIHAKIANRRRDHLHKLSTDLVRMHQAVFVGNVNAQALTQTRMAKSVLDAGWSAFRTMLQYKCDDAGVWFKEVDEKFSTQECSACGARTGPKGLAGLSERSWACGACGAHHHRDVNSALVIRARGLAWLENEFSTVGEARAEEPVVNEHGPSGLCAVGHDRPVVGIPVLQGGEDVNKVQ

SEQ ID NO: 196 - protein, 390 aa, synthetic construct
  REGION 1..390: note = Synthetic
SKLVKTLQVRVKDRHAKLLRKWAFEVNQIWNFTNAYTAAAGKPKDFKVDCAQGENWSVKPVFGDWPTGYDMEKVVNPYRKSRNFVMLSATMSAVAQEHATRRQQFKKSKLRWRVSSGSKRSLGWIPFKKGNAVLKGDAIKVNGVLFKAFDIDYLKGHVLRAGNFAEDARGRWYFNAAVEYAKVVGAGKGAVGIDLGLKDCATCSDGSKLEATKHYRKFEEKLAKAQQAGKKKLVKTIHAKIKNKRKHDLHVFSTRIAETNAVVAVGDVSSSKLAKTKMAKSVMDAGWYMLKTQLKYKVIARSGVFEEVNEKYTTQVCSSCGHIGDNSPKGRAGLGIREWVCDKCNTKHDRDVNAATNILRAISRTRKETPKIKEKILKKPSIDAVLQKVG

SEQ ID NO: 197 - protein, 355 aa, synthetic construct
  REGION 1..355: note = Synthetic
KTLKLRIKDKHCKVLDQLASEVNFVWNYVNDLSFKHLKRTGDFFSAFDMAKYTKGTSKLCGLHSQTVDAIREEYAAKRKQFRKAKLKWRVSNKKSARRSLGWIPFKKSGLKYAEGWVEYGKTKFGLWDSYGLNKYAVRTGSFVEDSRGRWYVCLVVDSPKLDKPTATKAIGIDLGLKDIATCSDGTVISNPKFYRKYEQKLGTAQRAKNKKRVRALHAKIANCRKDHLHKASTMLVKENALIIVGNLSAKKLVKTKMAKSVLDTGFSELKTMLKYKCENASVLFEEVNESFTTQICSCCGEITASSPKGRADLRIRVWECENCSSVLDRDLNSAKNILALGHKRLAVGITLLSGG

SEQ ID NO: 198 - protein, 352 aa, synthetic construct
  REGION 1..352: note = Synthetic
KTLKLRIKDKHCKVLGQLASEVNFVWNYVNDLGFKHLKRKGEFLSAYDVAKYTKGASKECSLHSQTIQAVTEELVTRRKQFKKAKLKWRVSNKKSARRSLGWIPFKKVAVKYSDGLIQYGKNKFGMWDSYGLSKYTVRTGAFVEDSRGRWYVCLVVDLPKQEKPKATKAIGIDLGLKDIATCSDGTVISNPKFYRKYEQKLGIAQRARNKKRVRALHAKIANRRKDRLHKASTMLVRNNALIVVGSLSAKKLVKTKMAKSVLDTGFSKLKTMLKYKCENASVLFEEVNEAYTTQICSCCKRISSSSPKGRVDLGIREWTCQNCGTVWQRDLNSALNILALGHKRLAGGILLL

SEQ ID NO: 199 - protein, 374 aa, synthetic construct
  REGION 1..374: note = Synthetic
YQVLRLRIYHKHYAKLNKLASAVNFVWNYLNDLCLQMWRRKRVFPSAYDVSEYTKGAGKYLGLHSQTIEFIGEKHYQSRKQHKKVKLAWRTNRPDAKRKSLGWIPFKASAVKVLRTYNNGKKALKSQVQLSCGKEKLILTVFDQYDLRRYSGFRTAEVVQDSCGDWYLCLLVKVEAKTCTSTGEIGIDFGCKTAATCSNGDKLKTKFTQQYAGKLATAQRAHKKKQAKRINRKTRNSRADATHKFTSKLVRENRLIVAGNVKSSSFTSGKLAKSVYDANWFAINRQLEYKSRCAGCQFIVVDEKFSTQTCANCLQITNSSPKGVAGLGIREWVCDCCGQLNDRDVNAAKNILRFGRETLAGGSSVLRTGSTSLC

SEQ ID NO: 200 - protein, 330 aa, synthetic construct
  REGION 1..330: note = Synthetic
QDSRNRWYACITVKNYPKQTCGTGSVGIDLSLKDSATTSNGDKLQIKQTLKYAKALAIAQRAKNKQRIKAIHAKIKNTRLDLIHKFTTQLVRDNALIVVGDVKSRSFTNKKTKLAKSTYDAGWFELKRQLEYKCQQTGCRFEIVNEKYTTQICSHCGDMSSSPKGRAGLAIREWACAKCGTWHDSDLMPLRTFLRPSLTVLQKESPHFRAGRESTMGDKHICRFDSGIIGFIYAEKEKIRQEFGVERITKEIEAKVAKQFERRLELQSQYLNGEVYCFFIYRVNTAEFEKYGEHCLERSEVLDSCTGYYQKCDAIFDMLDMLENLSKNAA

SEQ ID NO: 201 - protein, 368 aa, synthetic construct
  REGION 1..368: note = Synthetic
TNIRVLRERVKDKHCTLLNNLSKDVNLVWNYCNELSSKHTERTGQFISSYTMDRYTAGATKEGLNIPASTVQAISSEYCTRRKQFKKRRLAWRKSGGSKRSLGWIPFKKDSIHYRNGQIFFQKKPISIFKSYDLQDKVIKCGSFSQDARGRWYVNLTVEVQICTNNSSPRAVGIDLGLKTTAVTSDGIQMVSQRYRELEKKLAVAQRANKNKLAKTISAKIKNRRSNDQHQFSRLLANKYGAIFVGNIPSSKLIKTKMAKSVYDAGWSQFKTMLEYKCHEAGVVFLEVNESNTTQTCSSCGEKPPSRPKGIAGLGIRQWTCDCCGVIHDRDINASKNILRIGLDTLVVGASKLKQEGFKEPPCFSYGE

SEQ ID NO: 202 - protein, 375 aa, synthetic construct
  REGION 1..375: note = Synthetic
PGAKLHRPNRLDALCQGRDHPYRPNGSEDLQLPRQGRDERLIALGDAVNTVWNYFNEISMRSAQRGPIWAAKKQLRVLTKGSGKLLGLPSQVVQEMINQYVIKRKAARRPKLRWRASRGPRRALGWVPFTNQDIALDGTTVLLRGQRFRLWLHRAVEGRIKSGNFSQDARGRWYCNLVCEVPRSQGRGRDDIGVDLGLKSVAKCSDGTGLEQAQFYRCLEPKLAEAQRKRRKRQVKSIHAKIANRRKDVLHKFSRALVDRARKITVGDVSASAMTKTRMAKSVLDAGWSTLRGMLRYKCDHAGVAYAEVNEANTTRTCSFCGRLSGPTGLAGLSIRRWTCGECGSEHERDQNAARNIARLGCETPCPSGHGSPGF

SEQ ID NO: 203 - protein, 344 aa, synthetic construct
  REGION 1..344: note = Synthetic
AIKTIKIRIKDSTSKKDLKKMSCAINFVWNYCNETSFKAVRYNREWLSSGDLQDLTQGSSRELGLNSASIQMVCREYVQKRIQFKKRKLRFRGKKSLGWVPFRKDSIKFKNGSVVFNKRTYQVFQPERLPEGKFCSGEFCEDSRGNWYICIPVEVDVEKTKSKGEVGIDLGLKDVATLSDGTKVANNKYFRMMENKLAKAQRRKDKKKARKIHAKIRNRRLDTLHKASTNIIKKNELIVVGKFGAKNLVKTKMAKSINEAGTIMFKTMLKYKASVHQCRYVEVSENFSTQICSSCGVNPASSPKGVKDLGVREWVCSDCGAVHDRDVNAAMNILRFGRESLGLK

SEQ ID NO: 204 - protein, 649 aa, synthetic construct
  REGION 1..649: note = Synthetic
KQTIVTLQFKIKSLKPSLIAKLRQGAMEVNTSWNYCNEISHKAIADRHIWLTHFDLNTLMTGNMRFSDDNPFGFKVINNAVTQCVAAEYVTRREQFNKSLLRWRKSTGSLSSGRSTSWIPFKEEHINITYPYSFIQTTTTQKIKTHKKTGEQIVSTVVKETTQHKTVRVAGKNTPVENLYALYSMHNDSGSEYGLPRCLGTPTIKVLGTHLKVFNEEYLGYYLYHLGAIVKSGSITENTIGEWFVNLAVAIDADIYREKHCFGKLNINPVAQREKLGLDPGAKTMVVASDGTEYYANGKRCVVSAYADANTSSTPTTLSDNPPLSPYLALEEQIKQAQRNNDWDQVRRLYLKGKNQLKDATSKAALDIIRKTQWINMGNLKITAVVKNRTVTLSEKDLKKRKSQAKRQSGIEKQTKKEELAKQQQHQELFKNKYNSVHNSSNSSNSSNCVSLQGQTSTTNINKNTNKKNSTKNNNSQTTVANQPEHRLTKKRKGLGKSLLGQGIGQLKSRLGVYSQRTGRGYKEENEAFTSQECCNCGRRTGPRGLRQLGVRKWVCGSQHQIGLFDPMKVKIVHEGCGTTHLRDHCAARNLERRENPIVKAHGLTQHPPRNGQAFEKSEKNNSSKTHQRNSQNTTELSGSSRAGKNRKR

SEQ ID NO: 205 - protein, 225 aa, synthetic construct
  REGION 1..225: note = Synthetic
WLSRPVDGLVKTGSFTQDARGRWDVNVQCAVRDATEPVGHLDLGIDLGLTSQIACSEGVISRREHLTRQHATARAMAQRAHKKRRVKALQATMANIRKDWPHKATTAIARRAKLRVIGDVSSTKLIKTPFATSTYAAAWGIVRRQLPYKARRLAGICVDGHERCSRVTCADCGARSGPRGLRGLGVRTWVCLCCGVAHERDVNAARDILAFRSGRATPSKGIPVL

SEQ ID NO: 206 - protein, 310 aa, synthetic construct
  REGION 1..310: note = Synthetic
LCAPCPRVAPRSRGSGSLPYITDQPPRPSPSIASASHRARRHTPTVQAPAVCHQGFADCGLRPFKAAYIRLQDDTVTYCGHRFRLWLSRPVGGVVKTGSFTQDARGRWYVNLQCEVPDATEPVGTLDLGIDLGLKSHIACSDGLVYRRDNLTRQYAEALAMAQRAHKKRRMQGVQVKMDNTRRDWAHKATTAIARRAKLIVIWDVPSTKFFKTIFAKSTHDAGWGIVRHQLRYKAIRLAGVCVDGNERFSNVTCADCCARSGPRGLRALGVRTWVCTCCGVAHERDVNAARNILAFRTGRGTPVKGIPVL

SEQ ID NO: 207 - protein, 363 aa, synthetic construct
  REGION 1..363: note = Synthetic
YRYRIKDATSGTHLRQMAGAIHDVWNYCKEVSLLAFRRDKTWLTAYDLHKLTAGTSKDLRLSADTIQQVCTEYATRRRQCKKIKLTWRSRKRSLGWIPFKAAYIRLEDDTITYCGHRFRLWLSRPVEGGVKTGSFTQDARGLWYVNLQCDVADAAAPVGQLDLGIDLGLTHQITCSDGVQYSRANLTRRYEDALAMAQRAHKRRRVKKVQATIANRRSDLTHKATTAIARRAQLIIIGDVSSAKLVNTPFATSTYDAAWHRVRTQLRYKAIKLAGVCVSGREAFSSVTCSGCGARCGPRGLSGLGVRTWVCLCCGLMHERDVNAARNILAFRSGRATPSKGIPVLEGGEDVNTLLNIQECLRV

SEQ ID NO: 208 - protein, 227 aa, synthetic construct
  REGION 1..227: note = Synthetic
LRYCEPKPLQGTLKTGSFTQDARRHWYVNYQCEVDVPGIPLGSAEIGIDLGLKNQIACSDMDTPYSRANLTRRYAATLGMAQRGHKTKRVKALHARIANTRKDWAHKTTTAIVRRARLTVVGNVSSTPLRKTRLAKSVYDAGWSQLRTLLEYKAQRLGVSYREVNESGSSVTCAIYLARRGPTWTELPGGAEHGRVPSVSLRMIEIGTNSWPSDVLPKTRWNRRHHQ

SEQ ID NO: 209 - protein, 332 aa, synthetic construct
  REGION 1..332: note = Synthetic
YRYRIKDSIDIKFLKSIAGKVNHAWNTAQHTKLEYHKINNKWLNYKNLQREIKVAGLHSATTQHVVKEYVKKCGQFTKAKLRWRTGKKNLGWIPCTNQSVKFDKYTGNFQFMKRKFRVWYSRFIIGKIMTVSLNEDSRGRWYINVVCDVVVGKQHGERKIGIDLGCKDQLTCSDGVKYSRDNLTRKHEKKLATIQRARKKRQTKTLHAKIKNKRNDWNHKTTTEVCTTSKLVIVGNIGSKGLCKTKLAKSLYDASHAQIKTMLLYKAIRHGMVVKIVSEKFSTVTCSVCNVRSGPSGLSALGVRQWICLECGANHDRDVNAARNILLSVRGI

SEQ ID NO: 210 - protein, 374 aa, synthetic construct
  REGION 1..374: note = Synthetic
YLTYRYRIKDSSHLNFLKDKANKANFIWNYYNEISKKYWRESRKWVTEKELNQLTTGSSQDLDLNAQVIQAILKEFCKKRKQHKKLSWRSSKRKLGWIPFTNQNIRHIKNGSFQFMGRKFKFWKHRKLQGKIKSGSFNQNSLGYWFVNFVCELPNVPQVKGTKKVGIDLGLKSQITTSDGVSYQQTITKDYAVKLAKAQRAQKKKQVRKIHTRIKNKRKDWNHQITTEIVKNYDQVYVGDVKSNKIKSLKNLAKSVYNASWYQIKTFFSHKAKKLGKVFQEVSESHSTVTCSVCLSRTGPSGLGTLGVRAWNCSNCNAEHHRDVNAAQNILQFALGRESRLAETRQERVGGTIRKRFQTEIIESKIGDYNAVED

SEQ ID NO: 211 - protein, 384 aa, synthetic construct
  REGION 1..384: note = Synthetic
MKYEVNLVWNFCNETMRKRWKESRLPTDMNLLHALTKGSSQELNLHSQTIQATYEELLNKSKQFKKFIRWRSLKRHLGWIPLKASAIKFNGDYITYCKNKYRFWDHRKLPEGSRILCGSFCEDTQGRWYLNLVVKFPEYLAKGLKEVTAIDLGLKTVAVLADGTEYKRDNLTKKYQDKLAKSQKHRKKRQVKKLHAKIKNARSDFNHKVSHDIAKNYQTVFCGDVSSSKLSQTKFAKSVYDASWYQLKTLLSYKVLRRQGVYQEINEKFSTVLCSTCGSKSGPSGVKELGVREWTCSACKEVHNRDVNAAKNILRFGHETLSGTLKNRLYEGSPALKGGEDVTIQRRFTNVKTAVLSVMKKTSSTPKIPFNQRAFHEFGQASSL

SEQ ID NO: 212 - protein, 363 aa, synthetic construct
  REGION 1..363: note = Synthetic
RLLVFTYRYRIRDSSSKVRLKKLASSVNFVWNYVNKLSFENIKQHGRFLSTYDVNYYLNGCSKGLEIGSSSIQEIARFYVQTRQQFKKRKLSWRSAKRSLGWVPLRHDGFKLKNDTVRYCGHDFKLWKHRELPQGAKIKTGSFVQDARDRWYLNVSFEVPDVEVHALPRTEVGIDLGIKNQLTLSTGENFTRGSETKKFAVDLAHAQRARKKKRMKAVSAKAANRRSDWTHKVTTDIVRRFATVFVGDLKTSELVAKSSLSNFSSLYDASIGSIKHCLKYKAKKLGGACYVVNEAYTSVTCYFCEARSGPTGKGGLAIREWTCQSCGAVHHRDVNAARNILRRGHSTLQRSLIGGDATLSTSA

SEQ ID NO: 213 - protein, 370 aa, synthetic construct
  REGION 1..370: note = Synthetic
LQYLTYKFRLKDGGNKRKQLLRWASAVNTVWNYCNEASYQTLRKHSKWLSFKELTNLTAGSNKELELQSQVVQQVCKEYVRKRVQTKRQKLSWRKSHGSKRSLGWIPCTNQNIVVYDGQEVVFNKKTFKFWKSREIPDTIKSVSFNEDARGRWYVNFVCEVEEAPQYGMLDLGVDLGIKTQATISDGRKFERENLTKKYEDRLAMAQRARKKKLVRTIQTKIANIRKDWNHKTANAILKDARLVVIGDVSCTKLAKTKMAKSVLDSAWGQLRLFLRYKAIRLGTIYMDQNESWTTIPCSDCFERTGPSGLRGLSIREWVCSNCGSIHDRDVNAARNILRLGLQTPIKGISTVKKRKSHKENEEQENVVPA

SEQ ID NO: 214 - protein, 237 aa, synthetic construct
  REGION 1..237: note = Synthetic
VGVKVEADTITYNGHTFKFWLSRPITSKVRFGSFCQDSKGHWFVNLVVEYFEIVRPKTGNAVGVDLGLKTLATLSDGVEFNRENLTKKFENQLAMAQRVRKKKRVTAIHAKIKNKRKDWNHKATTAIVSEYDKVVVGNVSSSKLIKTRMAKSVSDAGWSDFKQMLAYKAIKLGVEMKEVNESFSTVTCSCCGNRTGPKGEAGLRVREWICSSCGTVHYRDVNAAMNILRFSLLGITG

SEQ ID NO: 215 - protein, 389 aa, synthetic construct
  REGION 1..389: note = Synthetic
DLITTYHYRIKDSGKANRVLSQMSRSVNMVWNFCKQTQQEALKNKSVKLIDDKKSGDKISIPYFLTKFEMNNLVSGSSKELELHSQTVQFVSEEYITRRKQFKTLLRWRGKKSLGWVPFKSSAIKINNGKISYNKNEFSFWNSRELPEDAKIKTGSFCQDKIGHWYLNVSFESEQIGIKRDDDKKIGIDIGIKTLATCSNGEKIERPNLRKNALAKMRYLKRCQKFAQRKQSKSKKYHSLPKAKQERKLHVKVANIRQDYLHKESTKLVKKCSLIVVGDVPCKFMNRNKKLSGISLDSGIGMFKNMLKYKAVRAASIYKEISERDSTRTCSKCSEILPRIGLGVRTWTCEKCNTIHDRDVNASINILNAYKNMFPIGHDRPTRTKKNSS

SEQ ID NO: 216 - protein, 241 aa, synthetic construct
  REGION 1..241: note = Synthetic
LSWRGKKFLGWVPFKSSAIKIHNGKISYNKNEFSFWNSRELPEDAKIKTGSFCQDKLGRWFLNVTFKSEQISIHRTDDKKIGIDIGIKYHSLPKAKQERKLHAKVANIRQDYLHKEPTKLVKKCSLIVVGDVPCKFMNRNKKLAGISLDSGIGIFKNMLRYKAFRAASIYKEISERDSIRTCSKCSEILPRIELGVSTWTCEKCKTIFDRDVNASINILNAYKNMLPIGHDRPTRTKKNSS

SEQ ID NO: 217 - protein, 321 aa, synthetic construct
  REGION 1..321: note = Synthetic
NFSIFTFRSRIKGGFACRKLAKLEPQVNLLWNDCNATLYDAIRNHRKWISQTHFQGLVKGTSKELDINSQMIQAIRTKYVTRRIQFKKRKLRWRRRGSRNFLGRIRFNEQIASLERSEIYYKGEYYKFGNSWNSRNSHQRKIKRKVKSGSLSQDARSHWYPNVTCKVLVLKNKYTVELVGINVGVKTSALLIDGAVIENNSAHRANKKRQVKDIHASIQNRRKDSLHKETTKVGKKCHSAFVGDVSGKFVQSRNGKSSADENFSTIICSHCFEKIGPSGLSDLEVRGSICSECQSRHDQGINAAKSILRFGRESLRVANAA

SEQ ID NO: 218 - protein, 367 aa, synthetic construct
  REGION 1..367: note = Synthetic
VVKTYSYRIKDSSCRNHLCRTAGSVNFVWNYLNATSCRAIRERRQWLSEFDLNNLTSGASKELPLLHSQTIQAISKEYVKARGQSNQAKLRWRSAKKKTLGWIPFKASGVKLEEDTIKYRGRVYRFWKSRDFPEGGRVVTGSFNQDAEGRWYVNLQFQMKIEEPEPKGERRLGIDLGLKTQATCSDGEKLKRPNLTKEWEEKLAVAQRAGKKKRVRKIHAKIRDIRQDWNHKESTKLIESCSLIRVGNVSSSGLMKTRMAKSVADAGWFQFKTMLKYKAITHGVDFEETNEAFSTVTCSQCLERTGPSGIRNVGIREWICSSCRASHDRDVNAAKNILIFGLVGRPDAGRFPLSSGNAGTGGSKKNS

SEQ ID NO: 219 - protein, 353 aa, synthetic construct
  REGION 1..353: note = Synthetic
QIITYKFKLKNGSSKLNNLSTKVNYVWNYCNEVSHTAIKTNRKWLSEFDLNNLTSGTSKILNLGSSTIQSITETYVKSRNQAKCNKLNWRHSKGSRKSLGWVPFKGNSIRIQDNTIIFMKSKFRFIKTREIVGQYRCGSFVQDSCGDWYVCLVYKVNTKPSINNLSVGIDLGLKSLVTTSDGQVFENPKLTNKYAQRLAMSQRSNNKKRTKRIHRKIARTRKDNLHKISSELTKTYSNIIVGDLNLKSGKQTNDASFRGLIPLLKYKASMLGGNVIEVNEAYSSKTCNVCLDESGPIGLTGLSVREWTCGSCGTIHDRDINGAKNILVFGYKHLKTSNELRTSSNEGSLGGAR

SEQ ID NO: 220 - protein, 453 aa, synthetic construct
  REGION 1..453: note = Synthetic
KVTRKFRIMVSKDYKRHLDEMAAKVNFVWNYCVELMSTDRKKQLGSLSGIFHQPTRQEEVEVTEDGKTKKKKAWTLKRKIHIARDQILDLEVGDYLSGYDLQKFCAGASKELGLPSATISLICDEVAKSYVQKAILLSKKDKKATKAKKGKKARPKRVAMAADGSAIVIFPIPSFLRFRSNKRSRPWIPMKGASMHFDHSTEILKFNGLNFKVWVEPHRKISGKIADGKLIKEGGKWYVSVCVDLEPGDFRKVGTGAVGIDLGLKTFATLSTGEKIDNPLEPTVSFWGKSGTITEMISRLQSFRDKTASERKKKKISEAMLRFEAIATESRKHFHFGILNTLLDRFGEVYIGDLGGKFIQASAGKKSKALSIGLFKSRAEWIAKRRGRQIIMVDESHTTVTCGNCLERTGPSGAEDLDVREWVCAKCGTQHDRDVNAAQNILRRGLSLRPGLG

SEQ ID NO: 221 - protein, 601 aa, synthetic construct
  REGION 1..601: note = Synthetic
PVETVAYRYGLLPPLDWGEDVESQLRAQNDLWNKLVEIDRAFRERVRAVAAADAEVITLEAQRAPLLDGLVQLKDQRARERQRLRTRARTPELDAAIAEKVAALRDLAPITKEARKRAYGSARMTLRAIEDERIGVVKAARQEAANKGLWWGNYNAVIDSYETARKRAAKEGADLHLHRYSEAEGRLTNQIQGGMTVKELFSGGHSQVQVVPHHESPTRTGRRWRNHVQQVALRATAFTSAGNRRMVTWPLIMHRPLPEDARIQMVTVHRRKVADRNSWHVVFVLRAPVRERAPTEDAVAVNLGWRKTPTGLRVAAILRHGAEYAESITLPQRMVDGVVAGERNRGDIDRELNAMRAWLSKLDAAQAGDETQRVVAALRNVPHPGARGRHFEWLRTTWERDCPKWRAADLEELRKFGRRWRRYLRDDACGRHWFRDARRDHFRTQVKHLIGNAAVIIINAHDMSETAESDALPGPVQHNRAIAAPSECRLAILNHARKTGAKVVVYGGAHDRCGCHGLPFGTRDRTTLRWACPASHLGVDQDEDYCRLMLREQRGVGETDGGARDEETVELKRSYRPNRKSDRPRGAAEAGSGTTRSNPSP

SEQ ID NO: 222 - protein, 597 aa, synthetic construct
  REGION 1..597: note = Synthetic
DVEIIAYRYGLQPPLDWGDDIEVAMQRQVDLWNRLVEIEQEYRGGVREIVASEANLELIRAERVELLQDLRQLIDQRSATHSKTRRRTTTPDLDSCIAATRKRLQEVTERAKATRAAAYTRLRLQLRELEDKRVKRVKEARQAAAAGGLWWGNYNAVIDSYEVARRGAIREGRELRFKRFTGEGRLTNQIIGGMSVVDLMSGTKAQISVGPVTGRRGRDGHVELRTLTATVYTDVGSRRTATWPIVMHRPLPANARVQTITVHRVRQADRWRWHAVIVLRQLRARGIPQGEVVAINLGWRKTAAGLRVATVLRSGNGEPEFIYLPARLIAGIVEGDRAHSRLDRKLNAMAEWLWALDLCDGPEQITQAIVTARDKKKLRPRHLEWLRCEWENHSERWRPHDLGYLQEFGRLWRRHWRSDAARRRWLINARRDHYRCETKRLIGDAEKIVINSHDLPSTIRASKDEAPPAVRRQHAMAAPAELRSIIENYSRRTGTSMVVREIAHDECAQCGEPLGAQNRSELVWKCRSCETRMDQDENFCRLMLAAEVSDPNPGAAVHIPEMQTYSTVYRWNRKRSRGRTQLSSDSNCGLEESPSVE

SEQ ID NO: 223 - protein, 546 aa, synthetic construct
  REGION 1..546: note = Synthetic
SIAVSYKYGLLAPMDWGDDCEEEILLQAAFWNRLVELENSYRQRVRAVECEDPNVVRLETERLALVSERERLNVKRNGERQAARSKIATPAIDRQIADVSSQLKGVAARCRETRRLAHEARREQLRLVNAERYMAVSQARRESGLFWSNYNAVIESYEVARQQTLKRGVDLRLKRRSGNGRITNQIQGGIRYEDLMAGRHSQVRIGPPPPGMRNKRGASLTMTVHRRGGIRRNVTWPIILHRPLPADAIIKVVVVHRRRRSDRWIWSAVFVCSCRADASERTGPRVAVNIGWRNTPAGIRVACILSEGDISPQYVMLPNQLAQGVQLCDKETSERDKDLNTVAALIRALDLAGMPSELAESTNAVREARRHNAPRFVRLLRDWREFAPNWRPADLEMLDDWARRDRRRWHNREERRAWVSDAREYHYRQEVRRLLGRAREILINAHDMSETARVKDSELPLPARRLRFIAAPSVFRLVLLNYARKTGIRVTVVERPHDTCVFCGGQLAPPDRAALWWKCDTCGCLFDQDEHYCRLLLVEPPYGCDA

SEQ ID NO: 224 - protein, 575 aa, synthetic construct
  REGION 1..575: note = Synthetic
SIEASVFRYGLLPPLDWGEDCEAELARQTQLWNQLVEIERAHVEKVRAITAADAAAGEAEQHWRALAEQRLDLVEQRKMRRKAARGKIPTPDLDEAIAVLSSPLQQATIAAKEARHNAYAAARDTLRSLDQEHYAAVKAAYQASGLWWGNYNAVVASYERARRACLKTGAELRFRHHDGSGRLTNQLQGGMSVAELFSGSRSQAHIGEKPAWMTHRAGVSLTVTGFVRGGVRRNITWPMVLHRPIPDEMRIKEIVVHRERVASRWKWHATFLCTSEPPLRALVNGPAVAINIGWRATPMGIRVATAIRTADDQPDYIVLPHDGIPAAVGRCEETAGVRADALNSMLSLLRQADWQGAPAELVEIARPLLRAPRVSAGRLASLCRFWRELRTEWNPELQAELEAWRRTDKRRWETDAHRRLWIRDARTDFYRREARRLIGAASVIIINRHDMAKTARNTDLPPRARHQRVVAAPSELRHWLLNCAERSGARLVVHTEGNSQCAECGGKLNVKEPEELRWRCPSCGRWLDQDQNYAKLMLAAVTDLPPREPDAVGETREARAAERLPREVVQRRTAE

SEQ ID NO: 225 - protein, 564 aa, synthetic construct
  REGION 1..564: note = Synthetic
LRTTTVRKYGCLPPLDWDEGSSNQLWLQNRFWNRLVEIEREHKETFFAITAEDSEVDRLDKEISALKARKVELISQKKKLKQKARQRVKTPEIDADIKVLTAKIKELVPQVKTARKAARERLKPKLQELEVNRKAAVKSARQEYAAAGLFWGNYNEIVNRYQRARQRAIKSGGELHFKRFDGTGMITQQLQGGRTAEQIFDTDDSQFAIILTDPTDYQEGDVCGRRHAGHRFALRIKTYGRGKSYKIVTLPLIMHRPLPDDCIVKEVRLNKRRVADQEQWTVVLTCSIPKPDLPEPTGAVTSVNFGWRQEEDGSLRVATIMRPGQPHFHIYCPAEIKQKIERVYEVRSIRDHSLNAVVSILKNMDWTEAPEDMKDVVARFRRTPKPSPASVVRVINAWDEHPKWNATTYNALHNWRERDRRYWREERHLHDRMTNRRQDLYRNEALKIVAGASAIIFENFDMSQTARLEDENGEKTQIPEAARHNRVIAAPSMIREAIRLQAGKRQIPIKTHRGKSTHKCSACGADMDAEDNHGQLYLTCKSCRTTMDQDKNACLTMLKSVAAE

SEQ ID NO: 226 - protein, 547 aa, synthetic construct
  REGION 1..547: note = Synthetic
KTEVVIRKYGLLQPTNWAEDCESEMRLMDDLWNKLVYINDEYISKYISLMCQEKNFSEAKSQYDNSVAASAAVSDIASSKRRLAIIQKDVARRMADALRALETSRREEVKVARQESGLWWGNYNALVRSFERARSAAIRGGQTMHRRSGGGDGRITNTLQGGAAVEALFDGSLSQIMVRPISARAWLSEIRGERRRLQRTFLSATVFVRDGERRTVTWPMIMHRPIPANCRVKEVIITRRRHGNSWRWAASFICTQQADRAVPEPTGAKRIAIDVGWRRVPDGLRVATVVISGQSPSFIVLPASMLESFSLIDELRSRLQASNRLGIEMLQSANLGSFAQPFQDLLRDFQSISEKRPVDLAKFCESDFFLLQARENVGMDLWAWRKGHKRLTEWLRNHHRKTVGHRNHFYQNKIIEALDQASEVIVNDVKVGEIAARRTSRSESPFVPNRVGHYRRIAAPSELIRALKLQAEKRKIAFNKLEAESPVRCPTCGSLSRKTRADALPQVCANCDSSFDQDVVACESLLSPAPTARTTRSVKARSAAATT

SEQ ID NO: 227 - protein, 538 aa, synthetic construct
  REGION 1..538: note = Synthetic
QKQIVIRRYGLLDPLDWDSDCDHEIERSNKLWNILVGIHEECAQKYYDLILKDEALNTAKSNYEKLQQNRASFTAVSEAKKQLAVTQKEVTKRMASELRDLELARREAVKVARQNSGVWWGNYNPLVRAFEKARSAALRGGHAMRRRAPGGNSRITNTLQGGADVEHLFDGSLSQVMIRSPSGRAWSAESRGERRRLQRTRLTATVFVQAGERRSVTWPMVMHRPIPDDCRVKEVIITRRRVGERWKWAVSFLCTRVMGSPPTPPAGAKPIAVDFGWRRIPDGLRVATVSSVDGQPRFVVLQRDLLDAFAFADELRDRVQTSGRVGLELLQTTDATLFEEPYQNLLIALQSRQEGRFTALREFCRGPFFTEQSRDAIGAEIATWRKEYMKLVTWLGNHQRKVVARRNHQYQNAAIEILEGASNIIINDIKFGEIGRRSARSEEASFFPRRANYYRVVAAPSELVRCLKLQAAKRGIQFSKEAAPSPAGCPECGSTARKSRADAMPQSCEACGTRFDQDVATCKSLLAQVGRKPRANQS

SEQ ID NO: 228 - protein, 560 aa, synthetic construct
  REGION 1..560: note = Synthetic
EKEVIVHQYGLLNPFDWTEDCTSELERMHAFKGRLVEIEHEYRISFDRLLERDPNLRNARQILDEHIRALSACDLSAIGEMEAFKLIPRAGQEHSGSTPERRLTALRIQVAEAYRVARKNFKDDLNNLELERRDQVKAARQQSGLWWGNYNAVIKAFEQGRRVSVLTRGVMRVEPFDGTGRFTNQIQGGISVESLVSGENIQVRVAPVPADAWSHSSRGERRRLQRTQLTATIFVRDGMRRMVTWPMIMHRPLPENVRIKEVVVSRARLDDRWLWSVVFVCTRTRVIKLGSAAAATVIAIDPGWRRTKTGLRVATIVRATGETEYFELSNRLVQAFRFADELRDRHNVLLANLRMLVSKLTAFQQAKIAGVGEACIDPANLRLPSDFRRLAELWSLDSDYDQRLVAQISHASVEYKRLYLWERNHTRKILNHRDKLYQELAVRVLKDANEILLHKIEIVEMNNNHIEAGRNGFVPDASNWYRKTAAISSLEHWMHNKGKRLGLRFKYIKSIYRQSCPSCGAFDRKNRADTLMYICAHCDHTWDRDWGTCRMMLKDHSSTT

SEQ ID NO: 229 - protein, 559 aa, synthetic construct
  REGION 1..559: note = Synthetic
LKEITIRQYGLLSPLDWGEDCEEELLRMNQLWNRLAEIEQVTREKYNTSIMTDQDVESIYQQIASSSDFQSSLIKERRSIRKQNGRKVETHNLDEQIRDLSHKIADLRNTAASSRKLAREKAGKRIRALEVERRAAVKLARQESGLWWGNYNAIVKAYERGRRIALRNGGQLQFKRYDGTGRIVNQIQGGMTVADLFGATHSQIAVDALPGDAWTHPSRGERRRLQRTRLTATIFVRSGERRTVTWPMIMHRPIPEDCLIKEVVVTRRKLGPSWQWQVTFTCTRSGSKQNRHTSTRRVVAVDLGWRRLPEGIRVATVVRNDDTPADFMIVPADIVDGFALIKTLQSRRDTMKNNIIAWLKTLDWAAAPEALTIHLPALQDATFISAGRVASLAIAWRNHQDWDAEGYRHLEKWRLADKRLWLWEVNQREKLIARRTDLYRRLSYNIVVNTDVVVINHLEIEKMSRLLLPEGKENPLFKAARHYRTVAAPSYLRKWIEIQARKIGATVVTQDMENWVCHACGAITMPARPYDLQQTCAHCGITCDRDMNTCRVMLKSFNR

SEQ ID NO: 230 - protein, 585 aa, synthetic construct
  REGION 1..585: note = Synthetic
PRDLIVRKYAVKGLAGWNDECEQELRRCTDLWNLLVEQHRAAQQRREATEDRDPAVRTAREALKELAAATPPDENAIKAARAALNEELKRVRKIPSTKAALQRIEIERREAATTARQKAVLDGLYWATASAILDGFTTARSSMLAKRGAGIAADLHFRRHDGGGRIVNQFTNGGLPLNAFLNRATEAGIPMTATVKNDAEPMPKTRMRRGKEETVQWRPPGEPHEIVVQAVLHRTIDSGIRQDFAGDPDVRIKSVSLVRRENKDWTRLMPPRDRFLTRDNAFVVTASAAAGSTIIDAPGREIVAVNLGWRKVPDGLRVATIVGQREDWPRLCRRPDRGMIADDSYFRVIPEAKLALPTRADELCGERDKLLAEMTPMLRRLPWADAPPAIVDLGSALAAAPKFGSRSLARLVVDWLLDAPEWQPEALAELESWRKHRDNHLRNQAKSALRHFIGWRGDWYRVLAKQISERATIVVTAVTDYSVLARIAAAGPAKAASHNRFLAANGLMMAELKRAMRARGKHVAEIGGIFTWRECQVCGRTLDVPTDIKADLHYMCRCGVTLDIDTNHCAALLRQFVEDRRAAVA

SEQ ID NO: 231 - protein, 648 aa, synthetic construct
  REGION 1..648: note = Synthetic
PVLTYKYGALYPTDWDNDCAVQIELQVDFWNKLAKIHRETGDIIRSLTPSTAELEEIIRKIDELKLEQAQIESGLKAEKTQRYRMNRFGVPSDKPNTGIAMVRLKEIRLTIKELAQRRATLSKIVRYELAAEKVILTYRTQQRMIKEARRASAANGLWWGNYNAVMASFDGSRSQIAKTGGVIKEKRYNGEGRLTVQLQGGASPEQLFSSSSSGARNEAYLIDAPPPGWEPRHQKNNQTPPTSGSRRSTRQRIVTLVMTVYTRRDDLNRLTRRVVHVPIVYDRPLPSDCRVQQIVLTRRKGNRRPTGDWRYDVMFILRVPEPECRHTQRAAAIHIGWRKVEDGIRAATVVDNNDVTYFVLPDNLVSRFVDASQWLSRADTEAESFRREILTWPLSDIPPSLKEDLEFLGRARSVGGIGRAMRWMTRNWSKYFYDYMPDYLNLLNRWMDDDLKCRWRARNIQQNAIRHRRDLVRVWISRLAKRYDVAIVQQYDISHLHRKDISLKSLPSGRRNIQRIAPGEIRANVVSTLRSRGVEVISYEKKVTWICHCCGTEIAPHDPLALRQRCTHCGEHWDIDENAARNALAALKQMATVRDVPSANVDASTPPSPDGISVEAGRFAFRKVASKIRRLQKVVSDRKGIAVSDETG

SEQ ID NO: 232 - protein, 629 aa, synthetic construct
  REGION 1..629: note = Synthetic
ATISYKYGALRPLDWGDDCLTQMKLQTDLWNALVTIHHDTAIAIRSLTPATKDLIEATAFLDDIKKDVAELEEAMKADKVARHFEKRSVITGKAGADKLRLLSLRKNLKEAAQTRVALAKKARAELAADKVKAIYDQQHVLVKEARQTAAAKGLWWGNYNAVMASFDGARSRIAKFGGELKEKYFHGEGRLTAQIQGGATAEEMFSLPGHGGSKAARLLDGPPPGWIDIHAPGSKKTSPTPGAKRELKRRMATLVLTVYTELGEDSKPSRRVLHVPFVYNRPFPPYARVQQVVMTRRRSYRAPASGWRYEVVFTLRVPEPVSCGLVRSAAVHVGWRTVDEGVRVATVADTQGVTYFVLPQMLASRFEAASTMLSTADKAAEAMRARVLDWPMPHPPATVQADLGAVSRARSGAGIARSLRWMARNWKQQAPEFMADIFPILADWAHNDLNYRWMARNIQAKAVRHRQDLVRVWVAGLALQYDNVIIQHYDISRHMRRDLAEASIPSARRNAQMMAPGELRAAVTMTLKSRGVAVRSHVEKVSWICHQCGVEHAPADPLALRVRCPGCGKYWDVDDNAAKNALSALVSAVNLQGETDPTCTEGGRFTKRRAAAVPKQAAALSATALVIPE

SEQ ID NO: 233 - protein, 594 aa, synthetic construct
  REGION 1..594: note = Synthetic
QVITVAAKYGAFRPINWAEDCEDELMKINRLWNRLVEIGRGADAARVVVECQDPEVYRLRTAAQEAAEAARNAARAVKAARAAARANTITPELVTDLAEARAAEKAAWEAYAPAVKVARKTFAAELRAVEVERQELVKAARNKSGLYWANYNAVIARYDAARDRAIKSGAEVHFRRHDGSGQFYVQIQGGMTQDQMCGTAPGGRGVATLRPVPSEPRQRYLSLWMRSIEEEGKRPRARWLTIPVRWHRDLPEGAVIMGIAATREIVADGTDTWSVSFSLRLPAPTLARGYRTLAVHTGWCAEPDGDYRVATIYDGVAVVPVTIRGLEQRHGSPADTILNRIARAVDAQSDADTDADEIWRQIRDMRLQDAPENIAAQMDLIRRTPMRVTDQLIGLADLWRQHLHYRPDIAEMLADWVPDAKRHRASAGRTLTRIALHRREIFRRQVAEWLNQYDRVIIDSVPIATLTTRDQLSDTAIDVIGRRQHAICAPGELRAWLSQRAKVVGRRVAVVPVATKITTTCWQCGTDVLFDVRRGRCKNGHTHDRDDNAVRNLYAEGLEIFAAQAVAESGAASVSGGRWGRAKAAKAAAAAGGR

SEQ ID NO: 234 - protein, 552 aa, synthetic construct
  REGION 1..552: note = Synthetic
MTDLWNALISIEQSYRTAVASRTAEDPSIAAIDATLTELDTRIENLLTEQKRLRRSARTRALPELPDVSQQLQTASSLRRSLRSQRKEVAKVVREKASDSLAKMAQERKSAIVAARRGSAKVGLYWGNYNEIIARFESASLRARKGRGTLRPAQHGGDGTLTVQVIPPVPTEKFPRGGEGWTLDVFPPTPPPQSVVRPPAAWLRPYTDCRGKPRALTGLTVVGARAAGGSPVQVVLDIAYHRPLPTDADVVYVRLTRRRAGSRWIHTISFTCRSDLVVEPATGATVGIDVGFRRIPEGLRVAVAAFSEGSIETLVLPEALLARHTAIADRQGRLDDAVNAMWGELLAESDALASAPDPLVATWAAELQRQSAGARLTHVGLLRLRAAWPQDWRADLRSKLEDWAFRRSRARNGLEAFRKRTARWGRELRRIWVANLVRRAGHVVIPDIDIRRITRRIHPDGTENILVLEHRRLAAIAAPGHLLDWIATQAVALGVTVTRCFDKATWICHVCGLEHAPIDAGQLIHRCCGCGTSWDQDYNAARNRAAALRPDP

SEQ ID NO: 235 - protein, 590 aa, synthetic construct
  REGION 1..590: note = Synthetic
GTTIRVYRYGLAPPLDWDDECDAEMARLDRFYNALVEIEEAAQAEYRRLSSSDETALLETRIAAAEEAKDWGAAKALRAALKEIRAALRKANAAAIDAAEEKRKADAKAARQNCGAYWSSYNAVIRSVELARQKAIKEGAAFGKRTHEPGKGDWRMTVQIQGGASVADVLGGKNSQLRIAAPAHFGALRDRPAGMSRKACRHGRVTMVVHNTGGLRRVTWPLMMHRPIPPEAIIVGAEIVKRRRLGSRWDDWHLCVTVREPAPAPHESPDCAGVNIGWRRLSVERGLVIDGAGLRIATIWDGATLNHVILPEEIISAAWRCDELTSAIDKRVDAATARIFKDSPDHPVARQLGDTFVESGRLRVRDLWTFANAMTPAPDWLLAMLRACSRDRRERAGLLRRMARRRRDIYRVAAKTIAENYGRIAICAVDWAKLARLRESGKDNPLPPPARGYRKIAAPGEFEAELRRAIKARGGTIMDIKDSVSFLCHACGKEHAPSERSAAHHTCPSCGATWDQDRNAAMNLFAALDSSGPAAIKPADSLENGKGEMQSTAYVGRFQRRAKQAQEAKLANKEALENASELVDETIGCK

SEQ ID NO: 236 - protein, 529 aa, synthetic construct
  REGION 1..529: note = Synthetic
MILNFKYGLQNPLGWDDDCEREITLQDALWNRLVALEATYRERVEDTIRQDQAYRAAADEILGVTNELETVLAERRAQRKAARAKLATPILDEQIAGLSKQRRELWAKAKPLRTAAFKFYRDELKVLSDERYASFTKARQESGLWWANYNAVLGSFDATLRRIEPWQTPRALGNEGRLSGRLSVQLQGGCPGPSFIAGSRNEARIDLRSGEWHRRGTYNWRPRYGHMVATVHAEGRGTRKLVRWPMVMHRPLPDGAVVKSIVITRRRPVPTSRLWKWEATLACEIPEPKESTTPFSCGIDIGWRKVEAGLRIATIADTATGLDHLVLPTALLERRARIAVLQGQVELEAREKGMAKTDHYDWRRLTLEVARWNRRRRDLYRVAAAELVRRCHLIGIDASGIASMAKDRRLPPETRRMRTWAAPAEFAAYVKDAARKAGATVRQVEGASTLVCHRCGHKNVASEADRQALVWRCAGCRGIWDQDENAAKNCLAAVLETSAAITVKAAAERKRPPRMNRKKKPPAIEEAAQ

SEQ ID NO: 237 - protein, 598 aa, synthetic construct
  REGION 1..598: note = Synthetic
PTQITVHTMGAHYRWQAPDILRQQLRLAHDLREDLVSLQLAYDEDIKTIWSSYPSVATAEVQVASAEERVESAAAAMKAARITARGKLADSPLAQQLREAKAALRTARQLRRNAITNVKDAAAQRRRDRSAQLATEQKSLYRRYCQSPTGHQLFWATFNYIVDQHKVAVRRIQQQRAQHKPATLRHHRFDGTGTIAVQLQRTAGRPPRTPLVVADPTGRYHNVLCMPWIRPQQWEDMSRAEKRRAGRITVRLRCGSIDSQPQWIDVPVQAHRWLPAEADIVGAKLTLARVGADLRAQLSITARIPDPIVAQHSDRPTVAIHLGWQACDSGTVVAHWRATKPLTIPRQLAHVIVPISDGVSGRIIAPALIATRLQRLSHTASTRDLALDSIRGKLTDWLDEHGPIPHPSRPNEQLTAAAVAQWRSPSRFAALALDWRDSGTEMSTQLEAWRRSDRLRWQQHGHGLSRARGYRDDLWRQVAHTLASQCGRIVVDDTNVTDVSRGALERSTLPTDRQREIDRRREYAAPGRLRQAIIAAATREAVPVTVVPAAGLSRIHSGCGHENPAELQPRKGVLTCRGCGRTYDPDLSATILMLQRAR

SEQ ID NO: 238 - protein, 595 aa, synthetic construct
  REGION 1..595: note = Synthetic
TGAVTVHTFGVHYRWELPPIIETQLRLAHEAREEFVALHLAYDADVKALWSSYPGVASAETELEQAETDCAAVTEQAKALRVQRSSRRTVPEIQAQLRAAKNRLSEARQARRDAITAVRDVSAQRRRDRLKQLRADQKALYTKYTGQGLYWATVNDIAAQHKALVQRINKQRREGRPAQLRHRRFDGTGTLTVQIQRRDAAPIRTPATLANTQGRYSYFAVLPWIAPQRWEAMAPAERRAAGRVSVRMRVGSTGEGQPQWVDIPVQAHRWLPAQADITHVRLSVKRIAARRTAQVLVTARTDQQHALASDRAAVAVHLGWRQTESGIQVASWRSTAPLQIPPALESVMIADPGATTGHIVVPPAITARLDRTDQLGSMRAESLPHVRDALAAWLHAHGPVQSQGRALTADVVRQWRSPAQFAAVAKAWRDSEAPDGIGATLEAWRKVDVRLWDRQEHGRRRALGHRDDLYRQVSAAIIGQARMVVVDDMDLSELARVANSDPGEPVALQRSAERRHRAAPGRFREAVEAAARRAGLRCEAVSPKGIARIHAACGYQNPGDGRFASSLVTCEGCGEQYEVDASTTLLMLRGAGVLS

SEQ ID NO: 239 - protein, 605 aa, synthetic construct
  REGION 1..605: note = Synthetic
FSGVTLSVHYTWRLSEPIREQLRLAHELREELVVIRLAYEADLQAIWSSFPAVAAAEERIAHAQAAWTAALESAKASRGQSERGVRRSPAETSAMSALREARQQRRAAITEVRAQAAGPRAVRTAAFNAAQRALYRPYVQERGLFWCTFNDVVAQHAGAVKRLRQQRITRPDATLRHHPFDGSGTIAVQLIRRRDDPPRSPAVVAALDGKYHNYFQLPWIDPEVWNQMSASQQRRAGRVVARFRYGRSADGPMLLVELPVQQHRQLPADADITGARLTIRHTPAGPRATLNVSATVPDPDPRRTGPAVAVHLGWRRGADGIIAATWRSTRALNIPEEFCAVVVAETTRTGRLIVPATLIDGFARADQIRAQRGQATRALQLSLVTWLAEHGPIDDPRTPGGVLDAATVEHWRGVAKFHALARAWEIAPPADAKSIAALLLRWQRRDLKLRRGPDLGQRRHAIAARDDLYRRFAAMLASQAKTLVLDDLLLPELTAASVPRPRAAHKGIAAARSVVAPGRLRTLVTTAALREGCAVREVGRFGLSRIHGDGCGYENPADARYQAATVHCDGCGQDYDQDHAATALMLRRAGAIRHGARASTSIVGP

SEQ ID NO: 240 - protein, 353 aa, synthetic construct
  REGION 1..353: note = Synthetic
MLLVELPVQQHRQLPADADITGARLTIRHTPAGPRATLNVSATVPDPDPRRTGPAVAVHLGWRRGADGIIAATWRSTRALNIPEEFCAVVVAETTRTGRLIVPATLIDGFARADQIRAQRGQATRALQLSLVTWLAEHGPIDDPRTPGGVLDAATVEHWRGVAKFHALARAWEIAPPADAKSIAALLLRWQRRDLKLRRGPDLGQRRHAIAARDDLYRRFAAMLASQAKTLVLDDLLLPELTAASVPRPRAAHKGIAAARSVVAPGRLRTLVTTAALREGCAVREVGRFGLSRIHGDGCGYENPADARYQAATVHCDGCGQDYDQDHAATALMLRRAGAIRHGARASTSIVGP

SEQ ID NO: 241 - protein, 618 aa, synthetic construct
  REGION 1..618: note = Synthetic
ITVVQYGVWHKWMRDVPRDVMDQLWLSHCVREDFVSTTLAYDARLKEIWSSFPVVGEAECRLLEASDALDVLLEEQRVVRQSSRSKKVSADLRSRLADARGVVRAARVGRRDAIQVAKDAAMPLIVQAKDAQREARRGLYAKYCSYGVPDRDGRVIRLYHATFNDVRVMHEAAEKRLASSRKQGGRGQMRHHRFDGTGTLCVSLLRTAGDPPRTPMVVANSESGAYRNVLGVPWVAPVVWEGLSRSQRRADGRVGVRMRVGYGDDLKSPTHVDIPVQAHRFLPAEADITGAKLSIRRRGTKLIGSLSITAKDVPDPLPVKDGPSIVLHWGWRDVPTGGAEVARWVSTSPLDIPVDMRGVFTCHDESRMSGAVIAPAVMFTKLDHVEALQSELDTAFNEARGVLSEWLRAHPDVVVDDPTSREPVVLTGAVVGAWRSHERLARLAWAWHRECPAGVEDMESVLWEWRCGHRHVSNIAANTRARAINARRDVYRNVAAVISGQCGGVGVDDMDLARLASRGASSELPDTVTAPGSRRRVYAAPGELRYCIVSACQKDGVTVVTLDTAENSHTCHACGYANPGDDRWLNPMVLCDGCGKVFDQNTNALLNLVDKYTATLAV

SEQ ID NO: 242 - protein, 631 aa, synthetic construct
  REGION 1..631: note = Synthetic
VIAVYRYGMPAWVELPEDVVDQLRLVHDLREDLVTLEHRLEDAISAIWSSYPDIRELETRLAAAVMQAEVLEAGVAEEKGKQRTRRPTTPLVAELTAARAAVRTLKQQRREQIRAVHGAAQPGIAAAVTEHRAAVKALYSDYVQTRGLYWACYNRTVERHRTAARRIAADRAAGRHGRMRHHRFDGSGVLSVQLQRQRHEPQRTPALLASGTGRWRTVLQLTPWIPPEVFEKMPSANRRRAARGTVTFHIGRNGSVELPVIVHRMLPADADVVTAQLVVRRVAGGRRVHLNVTVRLPDPVPSSSPDAVAGPDGAGSRPAVAVHFEWRRVADDGTLQVATWLASAPLLVSDGVRDVVMDDGSWSGTIQLPGSWRAATARDAELASRRDTRFDAIQATVVDWLRRNPPGAAGSAHPPICDGWEPPTAAEVARWHAPARLVIWARRIAERTSQPIPASLEVLFAQVEQWRREDRHLWERQTHGRDKALGRRDDAWRRVAAWLALTSGQIVLDDTVLTELSRTEATPIPQQVVAVASRQRMDAAVGRLREQIKTAAAREGVAVTLVSHLGLGRIHAACGYENPTDEVRRSADITCGGCGLRYDRDRNAVRLMLGAAATTPTSPKPTTVRRVTRAR

SEQ ID NO: 243 - protein, 588 aa, synthetic construct
  REGION 1..588: note = Synthetic
GWPVRVYRYGAPGWGGKRAITLSDRGHDQMRLAHRLRNDLVEVAETADARMAAWWADRLPDVYAALADAQAARESAWQGVQRARSVQRRRDVTGPEVDIYQAATAVLRAASAAVKAAQAGVRADDPDGVREMLTQTRAASAAAGKALYARYSEAGLYWATINAVRDDARVAEQRVIAARTAGRPSARRYARWDGSGRIAVQLQRASGDPRRTGVLLASGAGKWRNVLTIGPSEYGPRLRRVEFSTGRGQPPVGVDVAWHRDLPTGGDVTSAELVAHRIAGRTRYSVHFAVRVAPPVPVTAGPDLAVHLGWRQEPGGGVRAATWQSTVPLQVPAEMVGFVTADTPTGGRVIVPGALLERLARADEIRGGRDVALDEIRATLAAWLDQHPQPSLRDGDPDLTGPVVRAWRSPARFVALTAAWRADPREELDDIATQLETWRCADRRAWEREANLRSRTVGYRRDLYRQVAAWASTTAGRVVVDDTDLRQVIARAKTGDLLPGTAEAAIAGRRADVAPGDLRAAVVQAAIRDGVPVVTVPHKGGTVTHHACGASLPADERWLRPIVTCDRCGRDFDQDVNAAAGMLARAVQ

SEQ ID NO: 244 - protein, 615 aa, synthetic construct
  REGION 1..615: note = Synthetic
TIVYRYGVRTRTETGRYDLPAEVWQQIHLSHRLRNALVEVEHRHDEAMRDLWSAHPQVAEVEQRLAAAEQMVAELIDQARLEHSQDRTTATRRGTATNLREARRAVRDARAARRAAIGEAYPVVKPGIEAVRAARKAAIKDLYREYCQDGDLYWATYNAVVADHRIAVQAVERKRRQGQAAQLRYQRWDGTGTISVQLQRQAGQPARSPELLASGDGQWRNVLQVRPWMPPEQFDGLTRGERKRHGRGEAVWSVGGGRTVTLPIQVHRMMPADADVCEAQLVVTRTGAHWSAALCVTVRLPDPDPVEGRSPLALHCGWRHRPDGSVRVGTWASPEPLVPPANLADVLAAHDSGRWGEIVIPASWLELAGRPAALRSRRDLALEPVQRKLAEWLDQNPQPDGDDGRPGLTGGDVRRWRSANRFAALAIRWRDTPPPGEGAAEMTAVLEAWRRQDKHLWEWEAHSRARLRGRRDDAWRKVGAWLAEQAGVLVVDDVDLAALRQRGDVADDDPVLPGTAAGQARARAALAAPGRLRQCATGAADRRGVAVRTVESGYLTRTCPHCGERGDAHPRYAQSAVVTCPSCGRSYDQDRSAATLMLDRERSGDGPGKGERSQQ

SEQ ID NO: 245 - protein, 842 aa, synthetic construct
  REGION 1..842: note = Synthetic
PTRTTVFRYAVIKGDLPPQVLDELRRAHNCKNALVEIEKRYEDKIAAVFASHPEIAAAMAVVADAEEELGEVLREAGAERQRRHSSENTPQTTQAIRDARTRLRAAKDEMKKIRRQYTPGLKPQLRAVEAARKEELKAAYPASGQAGLYWASYNEARANFDTAVQAVQRDRRAGKPAGLRFRPWDGRGTIAVQLQRASGGRVKLTWSVKVRPLDDGGKPELPEVPVELVTDGDVKATLSSKEIEDGVRLYTAEITNRGPETAQVRWTADLEALLKYADYGADAEVAYSDALEDHVGAGNLLDGLKDAEGAGAPASLVWEAALPGGDEYRGPVVLRSEEGKWRNAARILPSFVLADDTDRRTLHQGKKAELDGVIEMRIGSTAYRDDIGESVTASVRTWLTGGGTDLIWHLAKDVKLAGRAEKVLECLADHADTIRDGGKTYGGMSRAQAVKASKLSSEDAEEAIRVLVRAGKIRDLSRKLLLVGVTYQDHVRLPVVLHRPLPEGADVSMLLLTRHKTGPHYKAHISVVADVPAPDPHTEGALTALHIGWRRLGDGAIRAGVVVGLPRDTEVSPEIRDWVRVHEDWAEIVLPANWRESWAHYDKLQSQRDLNMEDLRGWLTERFEQYPWLREHLDPSNSLSRWRSPERFIDMAGSMWIRPEDGGQWKIAPVPEVEGANRTVWGNVAMHVEAWRKQDKHLWTWLASGRQKLIGRRQSAYRVIAAWLTRDAAVVAVDAWDIKATSRTPRPESGENTKQAQIARANRTLASPGILRDSLRDAANARGIRVEVPELPGPTKHLGCGGVFDPDERAAGVMVCCPTCDKMVDQDVMSARALLEAAKAGQ

SEQ ID NO: 246 - protein, 620 aa, synthetic construct
  REGION 1..620: note = Synthetic
TTKVFKYRLNTADLPAEMLVAMRLATVNRIHGRGDVPAPVVDEIRRGHNLWNRLVELHKGYEEKLKEIWASHPRVAEIEERIRVLEEQAKQLGERAAAERMTARSRTGTSAETKAALKEAKAALKEAKAALKEAKDLAYPHVTPQIGDAKASLKEAIKATYAEFCQSSEGLYWATYNDIVRRRFPTAQKHVADARKQGRSAQLRFHPWDGTGTVTVQLMRQAGQPRRSPAVLADPNGPWANVARITMQGKRGRIRLRLGAGDAKDWVELGFIAHRPIPPNSDIVEVKVTRTRRGPDYEAHLCVVANVPAPPARTQGRLVAAHIGWRAMPEGHLRVAVVTGAAPPPAALVDAGIVRDHGSWQEIVLPKQWREDNDRVASLRSIRDRDFAQAHQQFCGWLDDERRRLLEELTGWDLSSVGQWRSADRLSAFVSAIRRSRKHRTERVAPGRAGIRDLWAGDSRLADGVLDLIVWDRQDLHLARMAAGTSGKLANRRKARYREVAAWVADEAAVIVVDEWSVGEAVRRPEDPGDDDRIAEAARANARIAAPGELRSTLTQAVTSRGGRVGDPPHRAAYRVHHECGGMLDTSSRMAQVMVPCQGCGQVVDQDWNVLQHMREAACS

SEQ ID NO: 247 - protein, 724 aa, synthetic construct
  REGION 1..724: note = Synthetic
TGEVTVARRYGAKPGPIPAAIREELDRAHWLVNRLVEIDRECDEQVTAVWEADPQVGPVLAAVRDAEDARAAASEELRRAKVKLGAVKSGRSRTGLDVARARVDAAREAVRQASAALKQARDRAGAVKQERWPAAAPVIRAAQEARDAAIRATYPEFVARGGYWATWNDITGAHKRRRDRVQQLRRQRRPAQMRYKRRDGTGTLTVQLQRQLGVSAAERAHVTGLRDAGLAPSQIAALITAGVPAAEVTPARVARLRAAGLSAPEVTQALVAGADPAAAAAASRTPGKAARRAALGEVLAAAAAARPPRTPGRRWRPQSVARVRAGGKDTPGDPPFTPDVLAGPAGPAALQVRPVLPPGYPQLPRRQQRALARQGEVVFRTGSAANAAYTTIPVVLHRPLPAGGDVKMGRLTVTRCGPDLEQSVSITARVPAPPPAAGHTAAVHIGWRALGDGAIRVAVITGPRTPPPRQLAEAGVVRPVGGCWEVVVPPRWQVALTRVDGMRSARDREWQQVRDRVAAAIPPGHDTLPPPAQVRAWRSPGRMVTLAAACEAGEHGGHGRAIADLVTPWARRDRAAWRNESRARRRILRRRDDAWAVIAAWLTAGAGTVIVDDWELPPLGRRPGLTEEDDPQWRAARANRVLAAPGALRARVRVTAELAGVAVAEFPVPRPGQAHAGCGHPLDPDARREDVLVPCLGCGVKVDQDINMLTLMLDGAREGAPQAG

SEQ ID NO: 248 - protein, 611 aa, synthetic construct
  REGION 1..611: note = Synthetic
DGEAIVYRYGCPHWADLDEAGLRQLRLAHNLWNELVAGELQHEETVRQLWAQHPEVGETLAVVTVAEEALTKLLERTKSEHVKDRSTRTRVETKSAVAEARRELRETRAVAKAAKKSAYAEMEPLFAEVKQAQRDAQRAFYGTYTGQGLYWAMWNDVLQRFQTTLQTIATQRRAGRPATVRFHRWTGEGTLTVQLQRQTGDPARTPSILLSPESKWKNVFVPPECAGEEWPERCRPAARPNQGRGNIRIRMGQDEQGAAQFAEIPVQMHRPLPSNGDVTLVRLTRKRIAGQYRLYFTITVRTERPAERSEGHAIAWNFGWRRLEDGSVRVGTFEASGTPAEPFSFGSPMFDEIVRVRDAGRSGEVVIPASWIEVIDKQEAIASLRSTSFDEARAVFATALVASPELVEALGVVPGDVSKWRSPSRLAAAVLRWRDLDDSLKGDALTRLEAWRRQDRHLWEWVANERNQLLARRRNVYRVIAAAVSDRFGTIVLDDADYRALARRPVPEEEDAEMARRSRAMRVLVAPGELRDALNQAAKRRGVPVDVHSAAGLTSIHETCGSDLSERSSADFAGSTRVWCATCEKSFDQDSNAAKNLLARLVDNEPGAKAG

SEQ ID NO: 249 - protein, 618 aa, synthetic construct
  REGION 1..618: note = Synthetic
AGRNCVYSYGTPAKVDIPDYAIEQLRLANRFWNGLVEIQHGYEQAVADIWASHPELAKLNNEIAQLVEHGRELKEKADAARVEGRRRYIADNDLKNELKRQREQLKAAKKSYRESKSLFYNQLKPRFTALKDKRVSDIKSLRQTFASQGLYWGTYNAVSQSFDTAAKRVSSLRSSGRSSALRFHRFDGSGTWTVQLQREAGDSPRTWATLVGGQSKWKNDVKIVPEELDEGGKRKRPRTLLSIRCGRQGKEAIYLSIPITIHRPIPPEAEVTQIQVTRKRVGTHFELSAAFSLRLPTPPERKNPGVVGINFGWRSRRSDELLRTAVWYGIGRDTQLELREWMTEWVTQERLAKGEIVGEIRVPDRWRRGMARMHEIRSQRDLNLNAIRGEVARWLTTHKDGAASLVSAWAQEHPNALKPLWNKPSDVGLWRSAGRLASLCLFWRTHRQSGDENVFAVFEAWRKQDKHLYDWESYSTRQLIAQRREVYRCVAEQLASTYGHIVVDGANFQTLTMKETRIEEADSEQADLARSQARDASPGLFREIMKRTASKLGTALTVEPANGITQVHSVCNTWVDADAAQKIMLWCPTCETSFDQDENASRNLIRLATGQATQLVKS

SEQ ID NO: 250 - protein, 573 aa, synthetic construct
  REGION 1..573: note = Synthetic
VYRYATGVRCDFDANAMAQLRMAHELYNEFVAIWRRHEEQKAAAWREHPEVDALTIAVEVLDEQLTDAVELWRKSKSKARNRTGDKELKAALDALRAELKEARSTLKKTKTDVHETLIPRFRELGDEAHAAGKATYADLVQTRGLYWATYNLVREQHLRAVQALNRKRTAGQPAELRFRRWQAQGQLAVQLQREATAPQRTPELLASGEGKWRNVISLPPMQERKHRSPLTIRTGVNEDGETTHLTVPEVIWHRPIPPEADITAATVSRQRIAGNHMLWAGLTAKIPVSDPSTAPGVCGVDTGWRTMPDGSIRVAIWRSKYNGDIVVPSHLHDSIRLDGEGGEVSIPPRYISKWLHIAELQSRRDRKMDRLREQLKGSPEVAEHLQEGERIDQWRSPNRFAALAFKMRESKSSTATLLEQWRKADRRLWEWQTHERLHVIDWRTDLYRVVAALLCGQNSIIAVEEPYVAKVTRKTENNSITDDATRKAFVIAAPSSLILCIKQAGVARGVSVTVHPAKHTTMMHKACGYLNEPGIGVRSSLIRCAGCEEIYDQDANAAWWLVDHASAELAPSI

SEQ ID NO: 251 - protein, 673 aa, synthetic construct
  REGION 1..673: note = Synthetic
KATRVYKYGCRPEITEQLLDQLKAARELRTELVNIENRRMEEFLALRSVSCPGLAELEEQNESLNECIEDVVKRISYAKKSERRKHPLQAELKALKAERKPVYEAVKAEREKFSELLGPHDKALALLKDTACAAAGFPTKKGMKRYSDDGKQMGAHLLGSLSREALDEMLARKDVPTEWKTAKNIDNEAKRSSKAALKATRCTSGTKFMIHNDVIAAAKKSKGRTRLKTRYDRESVALDIKSLRLSDVANGGSPLLRFVNESTASHGRVFVDCIVRFGVLPEPFVVGMSVLMHRPLPADSDIRSVRLCRERIGRRERWTIQFTVLTDEPNQRRVPKGGTIAINIGWRVRSGKAAMGAQFGKVSDIGDKHVRVGVAIDDDGNVRELTLPARMRRREEFIRSLQSASDKLFDSALSQFREIRKAHPELLDFELAIPGREPVTLLKKTIQCDKWRSHKKLLFAIRDLANHMGIDGRPIYAEWKKQRLAAKIDLFATLEETREWLSENGESEPLRQEVIWLLFWMRKCYHLDSMARDLIAKTTGWRREIFRIWAAQFAAAYQTLVTSDEKYKELKEKKPKEQDFEGPQEQKARANQHKASPGLLRSILRDAFGQRSIVVSASDVTKLHYDCGCELYGDRKKNVALACERDGSYHDQDENAARNMLRAVLEKRSEVAA

SEQ ID NO: 252 - protein, 600 aa, synthetic construct
  REGION 1..600: note = Synthetic
MPPRIYKYGLGKNIEGPDQRLPDQVFEQFRLQNRFWNALVEIEKAHAVKYDELRTGADARLGAVQERIDSMNESLEHINSDIKAQRKNARKVVPTDPATKKQIADIKGQIKALKIERKELRERIKGIIRPQAEALNTQRLQEINDKRREFAALGLYWCNYNAVLNSMETARKHILRKRAQGLPADFTFRPFTGQGRLTVQLMHGPPFSEILEGINTQLQLGPVPDDTWTSPDRAERRRLSRTQGRIRIGSEGFQGREPIWFEFPIVLHRPVPEEGKIKKAQVSRRKVGLDWVWELDLTVVLPEVQPEAQREPQTGAQPGQVRKVQHCIGLDLGWRKTDDGLRVAAWVDSDGQQGVFRLDVGYVATQDRLDGLKSVLDKNRDQITAQLLDWGKQHEHLPHWLDLQKVSVVKSHQYFLHLADTWANDRQEADQEVFEDLAQWRKRFVHLYSWHSNLSRKMRYRRREAFRLFAKKLAETYTHVFLEEFNLAWSSRKKDAEDTPLALQRASNKWARVASPGAFRQELQNFCNKTGSLLIFGKSDKASRTCPECKNKIAKDMSARIMVICEACRAEYDQDLGAAANVLCKGMENHFGKQPEDLAG

SEQ ID NO: 253 - protein, 593 aa, synthetic construct
  REGION 1..593: note = Synthetic
DKSARVYKFGSPLKTAVESEVAMEQLRLQNRFWNALVEADKVFTEKYWAIRDGADARLPVLRKQIEDIKVRTEEIRTEIKKGRQDGIKGTPSDLKAEIVELKAQKKPLIAEKKEIWAFVKDTVKPQLHELDGERYDKNVAIRQEYAQNGLYWGNYLAVMDSFETARMAIMKTQVEDGQKRPELQFHRFERVGRWTCQIQGGMNITQAFLGSNNYFQIDRLPADAWTHPSRGERGRLKRTKARIRIGSGEKKTVPIWLEIPIVMHRPIPESAEIKSVSIHVSKLADKFVWSLTVTVREDCSVPLERTGHCVAINIGWRAKGLATRIAYMLDSRGVEEEILLGSEYTVSNEKAASLQGIRKKNFNETVAWFNEWKKANADIVPPWLSERTKMMMSWKSEAQLASVAIQWSGRGFRREGDPPEFRFHGDEEAFNKIEAWRKQDKHLWQWHANLSDRIRGRRLCEYRKIALKLSKEYDVVIQEDFDLRKTKGKKKAEEGADNDDHIRRMSDLASVSTFRTETIRAMRSAGKEHVKLDSKNITKTCPFCGGTIKPGRKTNIMVQCSKCGKVYDQDWAASKNLLTAYLDSSGDVPPETP

SEQ ID NO: 254 - protein, 662 aa, synthetic construct
  REGION 1..662: note = Synthetic
TEVTRNWCYGAKAPTLNADMVDHQLWLAHNYKNRHIELERNRRITADAFARSLHPQFELDAAEYEVADAAVDAAFDLLKAERIAARSRVDATPAVAAAIREAKRIRCDVGARKKISSRAAYKLVNESQEPYKERAAAETVIPEGTTPAARDQLIYRNRLAMMEAAGVDAGAKVMYDARLAAREEFRDLGLNWGTYLTVEAATKDYHKGAPPEFRRFDGRGSIGVQIQVGGGLTYAAAVACANTFLRIQLPPLSERLATTGSDSGVQAHGVAWLRIGSVGHQPIWATVPFVYSREIPHDAVIKWAYLDRVRVGQKYHWKLRLNLKTSQVRRPAENRDMVAAHLGYRLVGEEIRVLTTLDTSGEVSTLSISREEVAAFGYMRKLESIRENASNLVTAALGRWSRVANISEWFQEHSDNISRWRGPERMSRLARSWRDNRFDADQSSSAEIPEFLEWAQLKLEEYRRQPHYRPTNPDDLTTVFGVVEFWRKYDKHLCEWSANQSRKCIARREQLYRTYAANLARRYNALAIPDVDWAELREKPAVDETDAQSKELRRLASIVSPGRLSAILVEVFSDRAHKTAAQGMTIICNACGKVHEFDKKQRVTTCVHCGATWDQDENAVRNTLANGLVKRARVESRNGAPDPDAPVKVRAVRRDRRRPATT

SEQ ID NO: 255 - protein, 582 aa, synthetic construct
  REGION 1..582: note = Synthetic
ATKNWVYGAKTPDIEQAVDAATLAAHRYRNRLCELEIDKRKRHEELLQRLAPGYVAACNAVEAAETRLAEIREAIQAERVKQRTKKPTGCDSLTAEATATKAQLKQLRATRKIEKQAAYSMPAVAEAMKVNTAQHKAQCAEAKTASGLYWGTEAIVRQACGSFASGAPPRFKRYDGEGQLAVQLQGGLDCADAERSNTLCYLGDAIDRKRRWCYIRIGSDGRAPIFARVPIVFHRPLPAGRIKWAYLERRKIASHVRWSIRLTIDCDPETDRCRDGEVAIHTGWRMEPSGLRVCTWLGSDGERGCLRLPTSHCDDYYKLDEIKSQRDLAFNEAIGQFMQWRAKQTELPEWLSELTSHIHQWKSANRLDDLAWRMYAHPTHDDDDIVDRLMDWRKQDKHRWQNERRLSVRIVRRRNDLFRNFAKQMSDRYGVAIVSPIDAKELTENSNPEDLERDNTQAHRHAKWAAVSTLTQCVREKFPLHCIEVSSVDITRQCCNCGTLSASTSRKVQCLECGHTHDVDDNAVVNTLARGEAAIKSGALLELVAAQEDKAASKAAKLAKMQEANRGARKHKQITKELQGKI

SEQ ID NO: 256 - protein, 632 aa, synthetic construct
  REGION 1..632: note = Synthetic
SLPTRKYSYGVCEFIPRKYIAPAPDSTPAVPAASPSRVPRQRFEGHDLAIEQMRLAHVFQNKLVKLERTRRHLIEQAILAHDSAYVQALADAEHEQAVLNLLRHQLRRANIHNRAIVSEESLAIRARNQEPVAKAAWDTCYQARRVAFTNAAVKSAIATIDSQSEADKAAARTEAVQHGLAWPTSLQVMGRVKKTGEMPQFRNLPDDEPIELNLENTISVQFQRKPDKLSPKQPVLDSKGNPRIHPRSKRPMMAHASGSSLDTANIFQPNTMCWIERTADRKLVYVHFRVGSTDKGKPVWAKLPTVLHRPLAEGQVKWVHLSRRRIGSRFKWDVMFDIARTEEWDTHPAGEERAKSGVVAVALGWRVIDGLVRAGEWVGDDGVQGAIRIADDLVSQWRYLESLQSIRDREFERWKAGVLNFVQSQVSLSPEWQARTANLARWRSPRRLVALVLWWRSNRIDGDKDAFLAAEGELICRPGQRNFYSGGRKQDKHLADEQAHLRSRLISYRKHLYQQLAIDLSYQYKQVIIEEIDWHKIAENPEVEDADEKVNKTYRAISACASLRNCLTQYMEEVQVSAVHIIDTCHRCGIRVKHPNAGRWIRCERCRGGSVDRAENAARNMLLRANAIVSTI

SEQ ID NO: 257 - protein, 639 aa, synthetic construct
  REGION 1..639: note = Synthetic
SLPSRVYRYHCRIAPESQALVDMLLRRANNYRNLLVENERRRREEVDALIQQVQPQLQVIEQTITSLSESIETVETEIKQIKQRSRPVTKKDGKDEAREKLSKEERQSLKDRRKELQASLKSLKVERKEAYESRKALRKATFSSEAWETASQDIENRFCRLDKLDRSRNGLNWGTYLIVEQAVSDRRKGPPPQFKSFSGNGSLAIQIQGPKDLLVPEAMLKGDNRLSIDSSGKYPTVRLGLGRSRRHNPRPKDEKTKKTILPWENPAAMQLEGPETGSKFQRQEQHILCTMKLHRPMPSDAKITWVKLVCRRVGIRSEWSIQFTLAKAEGWQKPYGSGTVAINLGWRLRPDGVRAAYCVDSQGHQEELILPNSPQKIPDEILAKLAELEQSGSDKDRKKAQRIREAYKRTNKVGILEVVAGLNSVRDKNLNTIKLQLATWLDANRVPESLTERLKTLRSWRSQKRLAGVVRFWRDNRFAGDAEMFDKLVAWDKQDIHLYAWESNAYRHYQDWRNNLYREFADRLAKRYGRVLLADIDWSKIQSRPGLEKTDEAKTIRARKLITSPSILQTALEQRFEEVVLFDPKHATRTHHRCGKLTKTTDTLALMHTCGACKETYDQDYNHCLNLLTIDGKNDFQVA

SEQ ID NO: 258 - protein, 543 aa, synthetic construct
  REGION 1..543: note = Synthetic
PEFTRVYRYGCKITDGAPIAYEQMRAGHKYRNELVAIERERREKAMLIMHSVAPHVEKLQVEIEQIKELIGSKEDELKALRQKDRRRTSSKELSAELATLRKRKKELIDEYKPKKDAAYESKAYKTASADMEEEDKEARLAARKATTAYWGTYGIIEQSTKKIRKGAPPQFHPWRGDGSIGVQMQRVMTPASAFGGKDDRAVLTPDPDGKHLIIRLRLKDRGGKVYVTCRARYHRPLPEGVRIRWIKLVCRRVATHDKWSVQFTLSRPTPWPKRRGFGTLAVNLGWRKLPNGDVRALSWLDDAGERGELILPKEQVGRLSKSESLQSIRDRNMDTVKLQLSSWLKTAENLPDWIQERLKTLSAWRSQARLASVVLFWRKNRFEGDEKLFDEAEAWRKQDKHLYEWQANNRRKYQAWRRDLYRNFAAKMTDRYDLLLLANVKFKQIQDKPKPEEETDEMRVARERKSITAPYELQQTLANGFHEVQKFDPKNLTAKHHGCGKLSQTSDPASVTHHCEHCGETYDQDHNHCQNLLAELSKAAVAA

SEQ ID NO: 259 - protein, 593 aa, synthetic construct
  REGION 1..593: note = Synthetic
PPDVLVYEFGARLDDECAGAVFEQIRKARFLYNSLVERIRFIHEEMNAWVLERAGPDARDLQTRLTGCEHDIGAARSRSDVAALRLLSPLRVELGKELTPLLRPVREQHRAAIKSLFFSRVGNTRATETYQLRCQAVADGLGWATATMVLDSALLAWKRTLVMGRAPKAADQGRHLQDTLVLQFTDKGGLPAERVLDGSNREIHLCAPEVARRRAYGRFRFRLGLAKDNVYATGGWQYHRPLPSAAHVSSARLVHRRVADQDRWVLQLVLRLPEPIHLPSAPVADLACLHFGWMKSGKGRRVVTVARSADPGAVECVELAASVEDDLQRYAALQSGRAKSRAALVPKIAALASSNRLPAGAIAAEVDAMVLQGDRVAPGKIYRLQTDLANVGIRRAWLDQWVSDDRKKWQAAVMLARRARGRRRDFYRVTALRLARDHRAIVVEPLDLKAASKSQNPQTGGWADFSHHARAGRVIAALHEFEAAIRWACVRHGTPVFELKAMTSQTCAVCGSAGVTAAPGHPRAMRCAACGASHDRHANAAACAWQWAHQGLDIRLESYRSEAQAQQSASKARADAIKEAVASKRWSVKEEGP

SEQ ID NO: 260 - protein, 606 aa, synthetic construct
  REGION 1..606: note = Synthetic
PPDVVVYEFGARLDSGSQAAAAAQIQQARQLYNALIGCIRIVHAQMNAWVLERAGPRAQALQAELSECEAAIAVARAGAEVERLHLLAPQRVELGIELTALLRPIRERHRADLRALFFSRVGNTTSTQTYRLRCQAVEAGLGWATATEVLDSALLAWKKSLALGRAPKFTNADRKEQDTLTLQFTLKGGLPVEQVLDGSSQEIHLTPADAARRRAYGAFRFRLGLARDGVNATGTWQHHRPIPQGAHVACARLVRRSVADKDRWSLQLVLRLAEPIRIDHTPLTDLAAVHFGWTRCEGGRRVATVARSADPGAAQPVVLPASIEGDLHHSAELQGRRALARDALLPHLATLANAKRQLPPGQRAELETLAKLPVNHVAFGRIYRLHKALAGIGLWRDWFDAWIRDDRMHWQAAVLLARRARGRRRDFYRYTALQIARDHRAVVMEPLDLRAASKAVDEASGQWAAFSRHARAGRVVVALHEFEHALRWACARHDTPVFELKGMTTRTCATCGAIGLAAAQDARQQVLCVHCGAEHDRHANAACCAWRWTHEGLDGRVQVHRNQAAGLIEQTKARVEARKLGIADKRRASRAASIACKQGGESEGPA

SEQ ID NO: 261 - protein, 591 aa, synthetic construct
  REGION 1..591: note = Synthetic
AISTYQFGVRIDKDSETLAWEQIKLARRLYNEIIAIQRQAYCDAQDFVYSKLDSEGKNIFDGIKKKNDEVREHKANFDDANMKVAIEDRSKMWKALSPLLKKARKEHRAEITEKFWSRLKTSASSEIGLLGKFYINQEGLGWATASDIIKRTSIAWSKSMTKGKPPQFSKASETIQDSLTLQFTAKGGCPFDAIKKQKSGFLKIHDYVVGRQYGEFSFRLGLAKNNNYANGTIQMHREPPKGSSVKIARLICRKVANKETWKLQLVLDFPDAEITDQSKRKPLVVVHMGWNMDVSGRRIAGITDESDSSCAEILQLPQSVEDDIKRADAIKSKRDKKRDEIVARIKKEIPDIYDEDINEELDRIKHLPVQHVAISRLHRFIQSCIYADIKLPDWLIVWKSKDKIKWQAHAGIANNARARRKQFYIDTSIRLASNYKAVVLEDIDLAEAAKKINDKGERSEFKKKARSGRFIASLFTLKEELRKQCDKHHTALFEQKAETVSTCANCESKEIKASADDYQELICGECGSHIDRKANGAAILYQINLTGIEQRTKEYHSQQLERKNQKAIAQAKALLKKQEANRKRIAEKNKA

SEQ ID NO: 262 - protein, 619 aa, synthetic construct
  REGION 1..619: note = Synthetic
DASIASYEYGARLDEECLALAWDQIAKARELYNKVVERIREIVGEMQAYVIAQGGPAAAELQSQIDACNRRFGMAKTCNDDRALREIALERRGRWKDFARLLASVRKDHMEILKSRFYARIGRNAGTDTYRLRAEAVAQGLGWATANAVLDNALRAYSESIAKGRPPRFSIGADKTHDTLTLQFTAAGGVSAADILSGRHSEIALVPTDGVGRRKYGQLRFRLGPAVARTDATGTFQYHRPLPEAAHVALARLVRRRIGFDAGWTIQLLVKRPPATMVVPGARKPLAAVHFGWATDTSGRKVAGLATGADPGCARLVQLPPSVEEDLQRASALQAARDAARDQLVVRLKDLTCGAVPEVAQAEFLALVALPAQQVSQRRLAAFCAKWESAPAESPDWLRQWRREDRLRWQASTHIARRARMRRRDFYRVLAAELANSYEVVAIEPLDLAATAKKIDESTGERGAFGAKARAGQNVAAVSELESAVRWACAKAGSVVLDVIAPTASTCSICGGALSDETDRPDQSAVQTIACPHCGARIDRKCNGAAVAWQIVWSERDAWIERYHLEAAQAMASREVNAVARKTKMAAARNAKRQALQEASIAAKETQAGEKAPTCRTGR

SEQ ID NO: 263 - protein, 600 aa, synthetic construct
  REGION 1..600: note = Synthetic
PVNVTIYEYRFVPDHECEGLIWEQIRKARKLYNGIVEIMRATIDQARALTLERASVDAQALSARIEALSQAFTDARAAKDDAAMKAAAQERRDCRRVLYPMLKTTRKEIKDELTPIYRTIGKNSACSTYQKRCEAVDDGLGWGTANAVLDAAIDSWKRCMAQGSKPSFSIGEERDQDTLTLQFTLAGGLPSARLFGGHHQELKITDNASRGKAIAFRLGKATDSVYATGVINWNGYREPPEGATIGLARLVARRHAYETRYAFQLMVKHPTPIAREIETPRQPLATIHFGWSTDATGRRVAAIADGADPGFTRLIRLDPSIEKDLTKSAEVTSCRSQQRDLIVAWLKSHRDEITGLPQELTDELAAILRLPAQYITQKRLYRLSFALADAGIDLPKLIEWRKEDRKRWQHAYGLARRARNRRRETWIQLARECVQRYKVIAMEPLDLAEAAVVVDEQTGERTEFNAAARRGRVIAGLHELRRALEWQCNKAGTPLLDISAPTVSTCAHCGDGTPVSHAEDPQILQCTSCGSVTDRKRHGATRAYQLVAPHREAMATLFHQQRESVWTEGQAKAADRKAKMAEGRRQSLIAAKAAESANLE

SEQ ID NO: 264 - protein, 614 aa, synthetic construct
  REGION 1..614: note = Synthetic
QGQHVVYEYGARIDSTSEVAIDTEIRRARALYNEIVEVLRALHDAMQAFVLERAPQTARDLVAQIARYDARFREAKAQNDRAAMQEIANRRNEARKALSPQMQEVRKAHKDELIERFYRQIGTSSRTATYACRVRAVQGGLGPYTANQVLEAALRAWKQSMKNGHPPRFIRYSEKTQDTLTIQFPEAGGVAAEDLFTGKRRDVIVAYPQNGFRRRSYTRFRFRLGPATAECYAQGTLQVDREPPHGARVTLVRLIRKRVGPRYRYTLQFLLNLADPIRLEVANRRKPLVALHFGWSFDEAGRQIAGISDNGNATDAHILSLPPSIEADLTRAATIRSQRDIELAAVAQRLKTEWKLPSLPEGDALRSQWEEFCGMPAHRISSHRLHALATCMRDRSVIPEWFDAWRKTDKLAWQSQMHKVRSARNRRTTFYRQVALDLARQYETIVLELPDLKKTTQKVNSTTGEKTELNRKARAGRVIASLHSLEAALHWAACKCGSAVLHLSGEPTVTLCSHCGSTTISPTPLNNQMLCCSDCGSTIDRKANGAANAWKLAQKQREKLVSEYWDTVGRKRCEMATLRAQKASGRAQARRASAAAKEKNRAARIAALDAKSEP

SEQ ID NO: 265 - protein, 607 aa, synthetic construct
  REGION 1..607: note = Synthetic
AGDVLVYKYGCRLDADSLAAVNEQISLARRLYNDLVADMRKAVEARTERVFELGGPSAAAIRDHIERLNAAFSSAKAVNDEAAMKAIAEERRGHWKSMSAALKDVHAQHKQELRTFLAGIGKNSDCTTYQTRSRYVAAGLGWATANQVLDSALQAFQSTIKMGQAPRFAVGSETNRDILSLQFTAAGGVAASKLLSGEHTELKLTPPAKGYGRRCYGDFSMRMGSAKANRWATGTWQAHRSIPEGAQVAGATLVREKVGPKFTWNIQLVLKLRAPMTAPVAAVREPLAVVHLGWSADSTGRRIGAIASAADPGLATLLQLPAEIESGLQRAADIQSRRDSARDNIVPFLKSIQSDVVSKWPEAIQEDFLKIKRLPATHVAASRLHRLWWHLHTADLLTPEVDQLTTWRAADRLAHQASVGLARSARGMRKDFYRNLALRQCQRFEAIVLDQPDLVDAAEKIDEVSGERNELGAKARSGRVVAALFEYTGALKWAAARCGTTLIEVDGETANICSHCGNIGLETVDGTQFQQQQCPACAAIVDRKCNAAASVFQRMSATIDDEVVKAAEKHAAAAQAALAKQRERLAKVQEARRRRIAEKGDSTANVE

SEQ ID NO: 266 - protein, 603 aa, synthetic construct
  REGION 1..603: note = Synthetic
ETLIYEYGCRLDAECLPDVSRQFDLAHRLYNDCVAAIRAARDEAEAVLRAAHPDYACACAHVDALDAEFKAAKADNDEEGMKRVRAMEREAWAACRPLRAQAKREAGDKLRQVYGRIGKNSGQELHRLAEAAKCEGLYWNTADETLAAVLQAWDKVKGSGGQVQFRRRSERTQDHISVRFTAAGGVSAGDVLAGYHSLVSLGEPGFRADRPDAKAYPGFRFSLGNKLHARGWWQNHRSFPEGARVTTVRLVRKRIGPDVRWALQFQLAVEEEHVPKINGIPKKRAPLAALHFGWSMSDDGLRRIAATCDSGDAAAAQFIDLPYDIQEDFARAKAVQSRRDTLRDEFVNLALKGDNIAMQGWMEDCIERLHMLRRLPVQHIAPSRLCHLNGMLRDSGTPWADLDTYAREDRLLWQEQRHIERRTRNRRLYFYRHLALDLVRRYETLVVSMPNLAESAKRIKDDGERNELGQMARTARSEAALYELKQALDWAAQRAGTAILWAKGFEHTKPCALCGAPVERVTDLACCHACGASADNKANSAANLFRDWLGRYAQAAEEAKAAIIKAKQDAAEAKKKRLALMQAKRAEVRAKAEKNEGESTRCK

SEQ ID NO: 267 - protein, 605 aa, synthetic construct
  REGION 1..605: note = Synthetic
DSNARVYQFGVRITKECTEKLTEQFMLAHNTYNQIIAEIRTTATEAIDWLEKKAGKEASQLRGRITELNDEYDSAKAADNREKLREVAEERRTLWRKWYELMHAVRREHGAELKSLFLERMRERKECSIYQIRCQAVKEGLGWATGNAVLKAAIQAYRKQWPKFKLPNFRRLAEVPRRTLELQFTKSGGIGVADVLAGGNPEISINNARAGRRAYGGFRMRIGSGGSRADITGTVYFHRPLPEEGRIKYARLIEHRIGKDRRHYVQFVVTDLDGGDEAIIAERLPLASLDFGWYYEEDGRRIAGFADSGEPSKARVLHLPPAIEALFARSERKKSERDKLRDEIVAALKAVDFQNAPEPLADELAKIKRLPPQYIASSRLARLAFNFRQNAPGYYTPFSERLEEWRKKDKLLWQAESHLASRARNLRKKHYENLALQWARRYEAIVIDTPDLSETAKVKDKKTGRHNKLGGVARGGRVKAALYELQQAIVNAAARFDTKVATIQGRTSKTCSLCGGRTATENAADREVKCESCGMLLDREKNAAAVAWQEAIKQMEAISAGFEEGRQKRMEMAENRKSKKLARQTARWRARTGSGQEKPEDSRNI

SEQ ID NO: 268 - protein, 688 aa, synthetic construct
  REGION 1..688: note = Synthetic
TTPTQIWSFGARPPERDAELIRETLFRARRYGNHLVEIERDRVESYQAIRARHCPAIAVLQEAMGAAETEVSAQYEAIKKDRAKRFARSREKSLEITPERKALLASAKAHRADVSARLKLARAEFEATLNPVRAEHKRRLTERKAALSVDGAKCGPRTAERVNAETLAEMVAEDWPAAWRELVLSDASAVVRNKARRALRDFGTGTGLLVESAIAQSIKDARPEPPNFRRFAGEGRLGGQVKNCTIADLLSGKNTMIRLRQSEHRAPKSAGNPWHPGQTEEHGERHRGQWWMVSLNIGSGERGKPTWVEFAVRMHRPLPMDGVVKWAWIKVSKTGDRMRYDLQLTLEAESFRLGSGRPAGVGRVAVNFGWRKTADGVRVATWLAESGETGEIAVSGAPRGLLSKMDRPKIHRGVTDSLLDRSLRVIRCAMSLSGSRGTYWDRMVSERNRGMLAVHVIALVKSSLGDRAAELFAEWKAERRARDMDLFADIGPVSRWAKARGVDPLGRLAFWLDLWRRKDRHMRQFEADERERATRQRNAIYRQAAIHLATKFGELVTDNTNIADMAKLAEPDERDDATEKSRATRHGVAPGEARAIMRDVFGKNRQIIVSAIDNSARCWQCAAKLAGDPMSVIRACETHGPIDVDANNCRNLLRRAGDGERSGGDENPGGAREAEIQDDSMALGHAAE

SEQ ID NO: 269 - protein, 678 aa, synthetic construct
  REGION 1..678: note = Synthetic
EFPTRIMTFGCLPPDVGGAEFSEQLLLAHRYRNKLVEIDRARRNKFRGIRAKYAPRLVEIEAALEALNAKMDEAYALSKQRGWLEQQIREAKRARDKLLAEAKRAQTIPFAPIEEANKTIEAMLARLAAANEAKADADTLKAARKLLGAEAKEERARYLDLLQPAQAEFRRRVDSHGKVGPRTTERLNMTIRSAMLEEPEWSEAWKETARSEELFLEMAKKARAECGVSPGTYLLVESAMEASKRAALGDVRFVAYNGEGRIGVQLKHTSIAGIREGESNFLRLEAARAPTKPGVTHRPDIYQRVWIRVATSADRKPVWAELPVKIHRGIPADAQIKWAWILVRRQGPRRIYSLQLTIESATALVSVRCGDGSVAMNLGWRKTDQGLRVGYCVGSDGTEQSIECDAKSLELFAFCDSLRSISDRHFDATRAEVKQWREASGRLTEPEWLNDALEFMSHWRSHRKLARVARNWVAEAIEPDLLRSLWTAWRTERIGAKLDLFCPLEEFEGWAPVRALDPSERFALWLEWWRRKDDHLWAWEANERQHAIRRRKQAYRLTAIDLAKRYNTIVIDDTDLRKMADLSKAGGELPEVARHQRMMAAPSELKAQLLEVFGKDRATKVPAKDNTALHAGCGGRMSEEPSMLHLRCTTCGAVADRDANNCENLLIRSGFSPKRRVG

SEQ ID NO: 270 - protein, 655 aa, synthetic construct
  REGION 1..655: note = Synthetic
TRVFTLEAKLSRDMQERLHELLREQKQYRNRLVELQRKRADEYQEIRRGFDPRLAEIDARLAALEIEEKRHGLDDDERAERKLLSAEAKPLRKAFNERLAAGNAELKRRKAGKFTHQARAAHEEAIAQMTKTKERWPKEWKAVAASELDVHREELAAREGSGLRQALYAAPDAEMQAAKGAASKAHVPCRPEFVRFDGEGRIKIQMHTGRQPAISNSVLAIINHDVEIREVPRRLPTEHRHPRVERSPDSVRPRKRFFDVRLRVSNEDGNEWLAFSAMAHRVIPDGTVAWVNLVAKHRGAHLCYQLQLELNSESWEQCSPLDAEEAAAVHLGWASNGNGTYQVAYALGTDGWTDKLVLDLRRSTDTGERCDLSGIEFGRSLRSAQDRHFEVARAAMVAWIKTKPAEAKASYTYRDRNGEHSTCLKEECAAIAQWRAPWKLRRAAARLATICGIDVKLPAFWQAWKAERLGRGLDLLDAPDVVMAWAAKHGVKTPVQMLAVYFAFWSRKSLHLESWEQDEWRQARGRRKDAMRAWWRKLERRYASAMVAEWDLTEIPSATRKRVDEDEQTKAARKNRGACAPGEMREIGKQAFGSARWEDAPAGDHALRCSQCGKASRSHPGSSVVTCSCGHAEDRSLRWCRNVLAVRATAKEAAE

SEQ ID NO: 271 - protein, 608 aa, synthetic construct
  REGION 1..608: note = Synthetic
TTPTRIWTYGLRWPRDPKDEAAVREQMYRAHRYQNVLIEIERTRRAEFRKARSGCSPELEELEKRVKVLTEAIEGQRHEIKSIRKVTRERTLNKAAADMLKTLQAERRLVGIALKAARARINESDELRLLAATLNEHSNARVREARAQSGLYWGTYLLVEKAMEAAARGKDDPRFRRFRGRGRVGVQIQKGMTVAELFSGHDTRLQVKPLPDGTWDTRPGRRHALTELKIRIGSNGREPIWATFDDLLQHRPLPADGIIKWAWIKLERLGTRTRWTFQLALESETFGERKHKPTTDRTVAVNLGWRLKADESLRVGYCVDEDGATRELILPARLRQHLFHADKLRSANDLIFDEAKKATQAWLKTVPPVDVDLQKLLEHMHAWHDHGKLVRVAMALTKAHSTPEECRKIWIDWKVTRFRALKDLYDSPAVVSDWLRAQGFEEPKVHALYLLIWWKKNDHMWNMEARERDRALGWRKDLYRNYAAGLARDYKQLLIEKFDLRDVAERPEAEDQTPHIQAAARARTHAAPSELRSALLAAFHGEHLEQSADHNTLACKRCGTITDDLPAEQIVIMCPACKSEHDQDKNNCENQLARYRGEYRGPTPQAAE

SEQ ID NO: 272 - protein, 627 aa, synthetic construct
  REGION 1..627: note = Synthetic
TTPTRIWSFGALEPTENQKLLLDQLFLANRYYNTLIEIERKRRERFREIRSAAVPELAGCEKRYEQLDAQLEAILDALPKPKGKSKRKVLTPEAIAIKEELKPLSLRMKALRAIFLLDTVAMAQVALTDDEANLAIKAARAATDLYWGTYLLIERQMEQVRKSKLDPRFRRFAGEGRVGVQLQGGLSTPELLSAEDSRLRLQPRTSTPRVKKPKAQHEVRVRVGSDGRAPIWATLPVILHRPLPADAEIKWAWIHVIRVGRRRIYSLQITLESQTFSQKQSGSGTVAINFGWRANEDGSRRVAYAVDDSGNEQVFSIPASVEKDFAQANSLRSIRDLHFEEAKRALMGFAALYTKDMPEWYAEEAKFLHQWRNPTRLVRLAQHLAEVRPVDRDELLRWRHERLGGTQHGRSARRLRSAPGQDLFAPFAEVIAWSTKRGVDALNLYLELWRDKDKHLWGWEASLRRSVDLRRNELFRIWAKRMAGYAEVRMEEFDLRKMTAIPAVGEEPRDSSFRSAQRAASPGKLRERIAEACGAKVMKGAAFHNTVTCFLCSHVNERSMEHRTVCAGCGEEFDQDANNCRNQLRERPSGAPEAGGARNPQKDPVVSDGYDESTVDRDVPSGVVAAE

SEQ ID NO: 273 - protein, 688 aa, synthetic construct
  REGION 1..688: note = Synthetic
KLPTRIYTFGLLPPKSGGEALHRMLRASCHYYNALLEIELWKRKETAKFWAQRGGYSDKLEQLETLNDAVRKTPDDAKPVLYSQIKELELHIRELREAVIMKSLPKEEARRREREKEIKADFKSRKIVLSKSRLMDLLDLEPDCVSPRRRFQLNFSVDSEKRGVKPSGKLLNKLLKEANLIKTTQHIDDQVSIDIERAKKYYGLYYGTYALIDDAVDQALRTSDTFPAFKRWTGEGRVGSPVSTNEGLNVSSVHDCSFENGTWADKGNTVLQIVKIPDEVWEQKTSREKGVDGEPNSSWVRKTRTNMRICVDSLGRANRGRLPVWVEFPIVIHRPLPKNGKIVGAWVSIFMRGNRTKYELQLQVQDETHLHPKKPHGDGTVAFNFGYRSTGRVAYTLDDTNFAQEMTVDPKVEKKIDLADKRRQSRELAANEMRDSILKWSKDCIFPDSFSRNDGKKIIIPHWSGEESRARSYNERSLRKKIELLPLAKDESLSNRLHSVHNEWKFVLAMDSLLSFFCGPNTLVRPEDKIIFEELNTWTFDDKSIQNHEAGSRFKSRKIRQNQIHVWAHEICDNNSTILIENTNYAKIKRVAKDNRGSVPVEVITSISRRRDAYAPGNTRKIIEEVAKARGLEVKKINPANLTRIHHACGHDAPWDASVSIEHECEKCRVEFDQDRNFCEGMLIRSKT

SEQ ID NO: 274 - protein, 695 aa, synthetic construct
  REGION 1..695: note = Synthetic
KPPTKIYTYGLRPPSVGAVEFNRVLRGGHNYYNALLEIERTKQEAEHDFWARLGSYESLLAEYREQRALRPSREDPDRQAVWDRQDELKAQVKAAREGTEAKHLPVEEVFRKQRSKELKKEYKGKELSAESLLDILDSDPRCVSPRRRAQLDFQVGAAARGVGVSAKKLNQELRDAGLGKVTQEIEDRASREINLARAHFGVHYGTYLLIEAQIEQALKTSEGFPVFKRWTGVTGEPDKEGRDYDTRSGEGRVGAPIDTTRGFFVAQIHDGQNAVLQIDPVPESVYVRSSERGTPRGHGESWRMGHRTKMRICVGSGERIKGQRGRNPMWVEFDMVMHRPLPVGGKICAAWVSVFRRGTRTRYELQLQVQAESLRPEHRHGEGITAINFGYRSSGRVAYTIDGRGVSSELLANPDTGRLIDLADKIRGQRQDAANLIRDSLFAWSEELGYPEVFEVGDGIGSTPHWSGVESRAREHPTRSLKARIEGLRSAREKSLSARLQAIFRTWTKLREQTRFDKDDLIYKHLREWVIEDKNQENRESGCRVHARGARNQNARLWAHSLCDSADVILLEDTNYALLKSKAKSVDIMPIEKQTAIARRRDFYAPGELREIVRLTAQNRGVLVVKVSATNLTAMHHACGRIENRDTLSSIVVNCTHCATKFDQDHNFCVGLRERYNAGQNPTPARRTRNRSKSR

SEQ ID NO: 275 - protein, 707 aa, synthetic construct
  REGION 1..707: note = Synthetic
KPPTKIYTYGLLQPTKNGHEFSKMCRAAHDYYNALLEIERTRQREEDDFWAKRGGYVDLLDEFRQLEAMRPRRDDPKREEIFARRKELRKKLWELRDVTVDRSLPIEDANRRNRHRELKKAAKAEGRNITDAEISASLDKDPSCVSPRRRAQLEYTEEAKARGVNVSGRGLNQYLRDRGLLKVTQPIDDRAAEDQKRARDHFELYYGTYLLVEPAAEQAIERSEMFPAFKPWRGEVGRVGAPVNTNTGISVEAIHNCFNEDPKTGERTFSDGGNTVLQIIPIRKEVRESRRVRVKGAPSAHQQGMKFLNQTVMRICVRSEGRVGAQRIPVWVEFPMQYHRDLPPNAKVTAAWVIASQLGTRTVYKLQLQVQDEAFRNPVKPCGRSTMAVNLGYRSTGRVAYALTQDGRYEVMDVKDRVGKCIDEADELRSLRDRDANRMRNDLFEWRDVEAYPQSFLEGDGEKFVPHWSGDEKRRRSVKVRSMKTRIDGLVHARDDSLPTRLRAIYETWERMREQGLLRSVDDRIFKVFREWYIEDKRSQDKEAHQRLNAHGTRELDIYAWAHRLCDEASLILVEDTNYATMKLKSNRRPKEELPVEISVSIARRRDMYAPGRMRKILEQVAVKRGVKIVRLSSVGLTQRHHKCGFDEPWDAMRSIQHKCEGCGVTFDQDRNFCEGLFERYRGTLPAAPARKAGKGKKSRDLPAEAE

SEQ ID NO: 276 - protein, 672 aa, synthetic construct
  REGION 1..672: note = Synthetic
PTHQHRWGDHPDPKKELIQVCSICKIESHKTVENTIEFRLGRPTFAGPESDCPKCNQDTDGDLCNGHTLIYQLRLGHDHRNKLTEAYRASTKLYREIIGEAPSLRMEELNSTIDELSEEIKSLKAILKADKTNKGAKDLKKKLTAKKKVATSERKDIREEIKQRPEIEDKITANNKKLAAEIKRIRNEFREQHKICWGTYGANERAARAAQYAPGRRKDPKFKHWSGDGIVSVQLQKGITAEQAWGGSKFLQITKPFSTPEDNPWTKNRPDGTPDRAFRRKNCRTTVRIRVGSSPTNRMKPIWVEFPITMHRSIPDDVKIKWAKIVQKRSGTTYRFYLQLTLSKDKAKEVQRPGVVAVNLGWRRVGDNNIRAAYWYGDDGRHGEVILEGEYSKKMETMCIKQAARDLALNQIKESFAVWLSRHKKEQDSLPQWLTGWRGISMIRNWESQRKLASFVLHWRKNRFDGDEAMFGELETWRSLDKAAYNRTRGIEYRCQLRKKDAYRKFAAFLAREYGKVVVDNTNYAKFKTKENFDGELNSKIVRKQASLASPGKMRILINNACGNHGAIFEALDSKHITAMCHQCGVINDWDHALSINHWCSDCGAFWDQDANAAINLCRSGGGTPPDFETPGDPRKSGIPSLAVNTKYDWIFQETIGPAEPAKRVRKATSRN

SEQ ID NO: 277 - protein, 651 aa, synthetic construct
  REGION 1..651: note = Synthetic
KLPSAIYKYWLMPPLEQDAVDAAFWAARRHYNTLIGIEIRRRRAYRELRSAMFPVLAALEVAEHELVVHLEAARKVLKAAKSRKRSRAVDPAVRVEVKTIQADLKVLRVRLREERRQVESPAALDLIDRLRALSKDDEEEAKSLREQLKEERSTTAFGRAVQVVDDGANEEVKKLRPTTYSGTYLLVEEAARAASKGKLDPRYDDAPAHLAEGRVGVHFCGGIGVDEVTSGTLMQIFPIPMFRTRLCDGKQHARGKAARTTLKFRIGSEGTRRSPVWATFPMVMDRPLPADARIKDAYVTRRPHDVRTPWRYELCVVVEAASLHSSRATVEQTGTTSVNFGWRKLDGGDLRVALVSSPRGVEEVRLPARVVSGFEKCSALQGTLSTNFDAVKVELAAWVAKHASSLPEAFLHELETMPKWKSQHRLAEVVWYWREHRLPGDEEIWSRLSNPMPKGEDPKSWPHGWLDRYRHLQCWVDNERRYLLDFRLDFYRREAKRICTSTACVVVDTFKISDVARRSLPEEVETGGQDARTNRVIAAPSILRREILRASAKWHCTVEVAKTENGTRRCNVCGVLAGAAVRKLVHACASCGAVWDQDVNNTDNLDEAHASGEVVTIVRPAGVAEDGRIVGGKTTSFGVAREAVSKLLKTE

SEQ ID NO: 278 - protein, 680 aa, synthetic construct
  REGION 1..680: note = Synthetic
KLPSRVYKYALRPPTLNAELVDESHCESRRYYNKLVTIENRRRHFYRLCRAKYFPEYARAEEDVSALELRLEEERTSILSKKSEGRTRQVSDADRGSVDQILAELKLARKRVVELGLPIRIVEHELRVVKLETERAELAGAGDEDGAREVVEKLVKLVKKLAKLRERLAKILNETAVVERVREAVARMREDVEVHDEEALEAVKALRSSLYWGTYLLVEKAFEQASAKSKYDVAYDDTPSHLLKSRIGVHWVGGTSVEEVLSNDTLMQIVDPPEFRQTKSGIYRPRYKRDEQGNIIYCMLRFRVGSVGKKKEPLWAELPLAYDRPLPVDGRIKFAYVTRRPLRERNPWQYYLCVSVEAASFERTLPHVTQEGTTTVNFGWRQLDSGNIRVATVNRDGGKVEYVEIPKYFVDGHVKCRKLQGLLDEKFEAVKKEIAGWISSRERHLPGMLPELFVESFEHVTMWKSQHKLCELVRYWEEHRVEGDDGIWSVVDEWRGRYLHLHDWMTNARRRLLGWRRDFYARVAKDLVITSAQVAIDTFKIADVAERPEAEAVEEGGERARWNRVVAAPSELRRAIEVAAKKYHCLVLAAPTVDGTRRCNVCGEIYEWDPAREFVHACPGKDGSGCSEWDQDVNNTDNLVDAVASGDVVPLVRPAEHRDGEDLISSEQLPYGIARKMLGK

SEQ ID NO: 279 - protein, 628 aa, synthetic construct
  REGION 1..628: note = Synthetic
TVPSCVYRYRLYEPRGETAPRAAEGFAGSRVHYNKLITIENQRRALYRQARSRLFPSLQLLEARYAEVNTNIKALRDAVQAGKVATRSRDVDPGKRAEIAALKASKKPLLEALRAARKICAESPEMLAAAKKIDDASKEQVKALRPETYWGTYLLVEAAAKQASMSSTGDPEYDLVPPYRCKSRIGVHFCPGIPTADLKNSTLMRIEPVKFHLDRHDNLIATGKAARTTLQFRIGSNEDRTPIWAILPMVMHRPIPEDAKIKDAYITRKRFSVRVPWEYHLCVVLESPSFQRTAPFPEQQGMAMVNFGWRSTPRGIRVAMIKRTDREPEEVLLPTHYLYLETKRRELASILAENFNRAKTQLTGWIAEHDCPEEFKQIFSHLANRRSQHWFAEWMDYWQEHRFPGDDEIFVALAAREDPNARRGKLAWRPEDIARASWMVRYRHLATWHDSLRRKFENWRSNFYRCVAKELATTTTKVVIEVFDMRKVARQPQAESPEDQGDERARSNRQLAAPSELRLKILQAAAKYHCQVEVVSPENNTRRCHECGELHPWDPKASIMHTCPGCGATWDQDVNNTMEQQAKVARGEVLTFVRPAQKGENTDGSTKIEQADSLTLEAARKAMVNSKK

SEQ ID NO: 280 - protein, 624 aa, synthetic construct
  REGION 1..624: note = Synthetic
PIPTKVYKYGLLAPVENVKLVDHAFYLGGKFYNKLIEIERTSRNEYRQERARRFPNHDKVEKLVATLSDQKKKLSEIIKASKIATKSRNVPPELATEYKTLAAAYKSAKLRQDAEREQCKKDRDFSAWTLTHNEKKNALVADARKNSGLMWGTYNAIAASVQQAGASAILDPEFKSYRGEGRIVVQIQGGIYLAELGSDTQLQINLPNLNESLTRGEWRQSSRTIVKMRIGSDKHKKPIWATFPAVFHRPLPSDARIMSATITRRRLGVFQSSGRYEYHLCISCESTMFDNEAVRPRLQDPTQQREVREHRGTSTINFGWRQFDQGKDKRLRIAMTNNEVTGLEPLWLPREIILGLQKCENLRSIIDMKFNEVRALLTTWLTPHKQDCPAWLAESLQFLHTWKQPDKLDRVVANWGSGMRFPADADIYPVLAEWRTKHRHLSEWMMRQRRKSYNHRDDYYLKTAARLAQSSSRMVIENFTISKVAVKPGPEVEKTGGNEARHNRTLAAVSELRSALIHACSKHHCPMDITPAVNNTRRCNVCGKLLDWDPAIKVDRQCPECSNWDQDVNATDNTNDKVASGDVVTMVVPAKTSENGEFEAGTISTFGSARKRLHNLEKTLTIQE

SEQ ID NO: 281 - protein, 698 aa, synthetic construct
  REGION 1..698: note = Synthetic
TDTMAFKFRILRIVSDEARIKREIREAHQLYNDLVAIERKRRDDTRLFWADRGGYADKLAGLRAAAEDAEKAAALTAKGDAGKKERQEIWAPVDTLKREIWELQRKTEEELSDPAKVRRKQRARELQAEAKARAGKALKKEALAALLDAEPDCMSPRDRRRLELVREYEARGVAVSGKAVAQRLRDEGLVGPTEQIEEAARKAGYEAYLKRGVSPGTRAIIADAFERSLEDLEPWATQRFSRWDGHGSFGVQVQGGSLTEEVYSGEHTQVRLRRLEDTGKHREGSRRSGRRHELRVRIGSDGRAPVWAVFEAIVDRPLPPEASIKRVVVTCDRLGVLDIYHVVFTCSVPSSVYHKRSGEQRGTVAVDFGWRSLGGEEMRVGYWVNDRGESGEIRLPGVGVARRGTTGKNSPYEPKIRGQVPIRQLDKHTRDLTEIMAREFAEYDGGKICGGALRDVASWLSANVSIVPEWLTERTTGIHVWRSQHRLYWLAQDWKAQRFDGDAEIFERLSAWASDWAHLAEWERRQHAAILAARNEHYRLVAVGLAKKYERIVINGADFAAAKRRKTKDETDRLVMIDDRSRSQAHLAAAGELREEIVRSAKKWQAIVMKAKPNKATCHACGSTCVYDAAKDLAHECEHCGVRWDQDENCCRNMLCEWSGDGQTAGGARVSPNAKKSGEVLRSKKRDEDGGPIGEAAE

SEQ ID NO: 282 - protein, 698 aa, synthetic construct
  REGION 1..698: note = Synthetic
QTIAYKYRILRVLSDERAIMDEIRAGHRLYNDLVAIERKRRAATEAFWAERGGYQDLLAERGKAIEFAESIPKGDDRREEKRAAWRAVNDLRKQIWECEKDAIKAFHASDPVKIRRMERAKELRAAAKARKEKLTAKKIADILDEEPDCLTERDKLRKTLIQSYKDRGVGISAKTVAGKLAEAFPGPTEHVEQEAKAAAYTAYRERGVTPGTRAVVADAHERSLEMLEWREQRFKPWSGHGAFGTQIQGGATYGDLCSGSHTFAQLECLDRGNYTPGSRRHGSLHRLRVRLGSDGQKPVWAEFEASLLRSGPRTSASTSDPIPPDARVMQVRVVVDRIGVHDHWYVCFTAQVPDAVHLRDEPPTKGGTVAIDIGWRSLDGGLRVGYFHDGQEHGPIDLPTIRKRLKPHGKRGAKAKWFEVRDVFDHASHIQGILSQEFYSEDKDAAVYGGALHDLAVWIDSRGRDALPEWLSESTAGIRQWRSQARLNGLVERWLHNRFEGDGQIVARMDQWRKDYRHLHEWCARERNRALNARDEHYRQTALRLARAYETIVINGADLATTRRRKRKEKAAPQLVMVEDAKRSQAFDAAPGKLREEIVKAAKKYGRTLVKLPFETERCHVCGEVCEFDRARYLSHKCEHEPCTAQWDQDANACLNALREWSGGAKTPGTARKRDKPAKSREKTTGRGDAIGAVSDSL

SEQ ID NO: 283 - protein, 619 aa, synthetic construct
  REGION 1..619: note = Synthetic
RNYSFVAWAPVENADKVHEQLRIAHAYQCGLVALERERRIEIDLIYQRALPAEWAAFSAAEAAEKAAFEACRRQRSNGGDMLPPDDDMKSERAEELRAAKGRLEAAREALKVARDAWYAGRKALTPTIKDQLRAVDKEAYAKAKRAYNLAGDVGLPWGTRLKIAESVERAAKMASKAGSLPHFPRFDGGGAIAVQLQHGLSRTAAMSGADTRFRLEIEEPRDEDYRVVKKDGRVVELPRPTPGSKRSQRRQVAVARLRIGSNGRAPVWAAWRIDFQNGYRPLPDNAPIKWVQMIARKVGSRTQWQLLLTVDDEPVPTRAHGPTLAVNFGWRNLLDGGLRVAFAVGSDGHREEVRVPAKYIEGIARVDSLRAIRDKRFEALKKDLEEWISDGAPEWLREATEWMSMWRSQKKLAFLISEWSRKRFDGDAKIFAALEQWLKKDKHLRFWECDEREKLIFGRKDFYRCVAARWAKTYARIVVAGMDLRDFAELPDPLDGAKGKDSVQRRSRFLAAPSVFFDAIKNACSTRGAAFEEVDGKYKTQTCNSCGIVFAFVARQSLEHQCECGAKWDQDENHCKNLLASGSAARKKAEVLAPSVGGEGGDSKEKKGRWGKRRSQQAE

SEQ ID NO: 284 - protein, 492 aa, synthetic construct
  REGION 1..492: note = Synthetic
MNLGRVYYNSLVEAENERRTTMWGGDRPPSPATHVCKKSCSTCDKAESKKRKPRKHECKKFCPVCRAHYKALRKQYRSEPPLDVKPFRKKAAEGGLYWGTYLVIEQDFSAAWKETESFSLVKFRSWRQGDMCAVQIQRDKDPDRMFLIKSAPDPRKKKQQRYTLRLRVGSKGQAPVWAEPLPFEMHRPLQGTATWVKIARKYVADRVIWSVQFTRRDIPERKDNAERGAVAIDVGWRKTDDGMRIAYARGDDGAEYELVLPPKWMKHADQADRIRSARDQNLVELQKQERFWSVILAVCGFSNKKLFARLKSTLSVRRVAKPGEHTKWIKKERHLWQYEAGCRNRSVTRRRNDVRVWLRDLRRRYAHAVIKDSCHKKMKENKTSLPKPARRQGHHAAPGEVIEEITRVFGRITGVSVVCAVDTTNHCPACSFVNSYGPERVVTCGGCGVVEDRDRVSTQNMMNMYAIGNVRNPTTRKSTPRFAKKHKDPEAP

SEQ ID NO: 285 - protein, 404 aa, synthetic construct
  REGION 1..404: note = Synthetic
VIEDAFAMACKDRSVLRLVKFRSWRDGGVAAVQIQRAAWERDGGASMYRTRAQVDNRTGRRTKHGGRQTLEIRIGSDGRNPIWSEPVRYEQHREAVGRPTWIKVSMKYRGDLEVWSVVVTCADVPPRPASEEAQRGVVAVDVGFRRVGDDIRIAYARDDRGKVSELLMDARWRELCNRADRIRGHRDDNFNALQEADSENLFSLTKSANGARQKIERLVREGEEVSQEMRAWMHRDRHLSQYEDGCRRRSVNARKDAMRKWARELRRNYSQLVLSKTAVKKMKENAKDDGLPKPARRQGQNAAPGELLDWLVMVFGRAEVAIVKPIHTTDTCVSCEHVNDHGPETIVVCEECGAALDRDEASTRNMMDLWVNGECEKPTARKASAKFAKKHKTEDKDDNASPAA

SEQ ID NO: 286 - protein, 498 aa, synthetic construct
  REGION 1..498: note = Synthetic
MTTKVFKYGALPVTLDSEIRKKMKLAREYYNQLVEAENGRRKTVWGGERPKQPPHEHKDEPVCEECKKHWKDIRDKYFATPPLDIKPLRAKASEAGLYWGTYLIIEESFSAAWKKTDGLSTVRYKSWRDGGIMGVQLQQAHSANGFYRIEQAPDPRKGRKAGQRHAVKIRIGTRENKPVWSEPIAFEMHRPLQGRPTWVKICYFYRGEREIWSVNITCTDVPERALPDTAKVLAIDIGWRVMSDDSIRAAYARDENGNESELLFDSRWRECGDRADRIRSARDDRLNELKKKDTRFSLIKKPSGIRGYVAKNSIEDTEVTEWIKQDRHLEQYELGCRRRSVAVRKEKLRVWLSSLRKQYATAIIKDSSHKEMKAAKRAKADGMPPPARRNAHHGAPGEIVEEICRAFGRQTNIAIVEAPGTTATCASCGQEMEIGAELMITCERCNAREDRDCISTRNMLRLYASGNCKKPTARKTIARFAKRHKNYVEPNQCQRDGL

SEQ ID NO: 287 - protein, 551 aa, synthetic construct
  REGION 1..551: note = Synthetic
VIVYRFGCCGGPLDDLDLVMAQMRLAHDYANDHTAIERGRRAALHAVDDTPEAREAAELVRAATKSTRKAAVTALRQARRAARAAAPDELARIAALDEAIRRDARALTQTYWGNYLTVEASAQQQRAMPLYEDDAVTPALPRFRRWVEEGQVSVQLQRGVATSAVRTGQDTRVRLDRGDRKVHKSGRVTEYADLWIRIGSSGTAGRDPVWTRVRAILHRQIPDAAQWKWVRLSRRREGRSYAWSVEITVNVERPARTLDTSIVGVLAVEPAWYERASDGAFVCATTRDDKGVTSDVVLPTRVVGAMRKAADIRAVRDTLSNAAREDVRRLLVESRDSLPVWLIDACQTMHLWKSPERMYRLARRWRDERCDAARESYDRVQAWEMRDDHLWRYEADSRGQAVRSRNDYYHVLAATWARSYRHAIVPRRDYSREARFGTESDLRFLSSPSSLVGAIDAAYDGGASAYEAPWVRLGDPHADEDKDARGWAALAIERFGAGDPAVTARKVRKNSESSDNGDNAWARRKKAKADKIALQGIAREPDANPADPQGV

SEQ ID NO: 288 - protein, 539 aa, synthetic construct
  REGION 1..539: note = Synthetic
MIVYRFGVDGVPLENLSLVMDQMRAAHNYANDLVAIERGRRSALHVVDDTPEVREAVLVVRAATKSTRKAAITALRQARKEARCANPDELARIQVLDMAIRADARDMTDAYWGNYLTVEQSAQQQRSMPLYEDDAITPALPRFRRWREEGQVGIQIQNGLATSVVRACTDMRVRVNALNLPGERKGATEYADLWIRIGSDGRSPIWTRVRTIFHRQVPDAAVWKWVRLSRRREGVTFSWSVEITVDVERPSRLLDSGISGVIAIEPQWIERPDGALICASYRDDKGGEGEVVMPARIVGALRKAADIRAVRDMLLNEARVDVQRLLVEALESLPLWLVEARNTIHLWKSPERFYRLVRRWRGERCDVARGAYDRLQAWELRDDHLWRYEAGSRGQALRSRNDFYHVEAAKWSRVYRHAIVPKRDYSREARFGAESDLRFMCSPSAFVLAIDSGFDHGESAYNCPWAQADADGPEWTAVAIERFGAADVAVVARRAKKDNDSEKKEGAWARRKRLKREKSSALQDTARKPDGNGPESLET

SEQ ID NO: 289 - protein, 525 aa, synthetic construct
  REGION 1..525: note = Synthetic
MIRVYQFALRTPVDNEPLARAQLLAAHRYRNQHVAIERGRRWAVRLCEASEEVDEAVALVQSATKSTRKDALKDLRAARKAARETHADELARIAELDAEIRRNARSHTSSYWGSYLTIEQSSDQVRRMPIYEPDGLTPSDPRFVRWTGAGQIGVQLQGGALTPDVLAGRDTRIRLIDGVLWLRVGSEGRDPIWAKWPIVQHREIPSGADWKWARVSLRKEGPWERWSCEITLEIPGEHPRNLDKDPQGAIAVEVTWDKPGDALVVARWRDDAGRTGTIELSEYDEQGIRKPDGIRSVRDQLLNDLKKRLPRAYAECRGDLGPPWLGEAIDGAQYWRSQSRAHTLLTRWRAEKCDAARAAYEILDAWWLRDMHLWEYEAGARGQALRRRREKYRVLAVTWSREYRHVILDDRVLSREARFGDASDLRFTAGPSELRQCLEHAFGGRNGGNVTTHPVRDDAAKSETEERDWCERAIDAWIAGGARATKKVSESTGVKGGAWSLRKSKKSQKQAENGTAREPVAKGAV

SEQ ID NO: 290 - protein, 575 aa, synthetic construct
  REGION 1..575: note = Synthetic
QMTTRVYRYGLLAPTENSELVRQQMRLGHRYQNDLIAIERGRRLAFAAVMSSDTRIAEAEAKITEIDAKISEAVERARQARVARRTKADTEQTKSEIRSLKASKAAAVLDLRAIKPLVQSELRPRIAEVDARAHELQISARAHCGVYWGTYLLAEAAAEQAAKTTKGELRFQRWDGSGQVSVQIQGGADVDDVVGDSDTRLRWPEYVEGTRKAKRTELAMRVSSEKGVPVWARWPMVYHRPLPTNARIKRAIVSLRMRGPREEWSVEVTIDASTCRLRDRPDGGKVAVHLGWRKEPSGNVRVATWLGDDGDAGTIECPERVLTGFAKCESLRSIRDRNLDELRARLVLAREGWPVWLRDATSSLYQWRSPGRFVALAQRWKAAGVAPEHASDYGAIEAWRYNDHHLWRWEHDQRLNSTRYRREVYRIAVAELSRRYRRAILMAADWAEMAKLPGIGEGAPDLPDEARAQRVETAPYVLTEALHSAMTEVVWVDPSYLSQACRHCDHKDTGDTWVRECTSCGKARDIDEAAVRTMLDLEEAGAWSWKKGGAKDESGKVREIRAPKWAKKHATEAAE

SEQ ID NO: 291 - protein, 684 aa, synthetic construct
  REGION 1..684: note = Synthetic
DPVIKNYEYGLLDPTFNAPLVDNQMRAGHRYYNQLVEIERDRRTAIGKILIGHPDTEALAARVAALVGQRDAARQAIKVSRQATRDRSETAQMRTRVKDLAVELKAARATLKAARDVIKTDPEIVTAIAAADEIAADRVRAARAATDCHWGSYLLQEQAIDAAKKAKAPPSFKRVSKLELEQKKIEDVAEDEDEDEDEDEDEDGVVEAKIKIAPWMGEGRVSVQLQGGISDTELFGTDTQIQIAPVSPDAHDPGKPRSVHRLASRTTLRLRVQSTDKGKPVWAEWPMILHRPIPAGARIKVATVSRRRRDCRRWDWRLLLTLEIPDGAIAARAIPAGGAVALNLGWCRRPGDEVRAGYVLSDDGAVDREIVVQRSTIDRVEKSEAIRSQRDKDLDVMRAAIVPWLREREAELPEWLVERTILSRAPREPREQQEPLDAPRVETATRMRSWHIAQWRSASRFRALAFAWRAQRFGGDEAGYQILEAWRYRDEHLERYESGMRRGGLLDRRESYRLLAADLAARFRTLVVDDFDLRTFQEKPKPEDTRVERAAAKRNQRHAAGSELRGALLNAFGPARVQKESSVDVTRACASVLAATGHVCGQIDDWDHAAAREHTCSECGVSWDQDQNACKNLIGRWRISERLGADKATETPRDANVAPKKESRSERLRRTRWKREEVAALDTP

SEQ ID NO: 292 - protein, 597 aa, synthetic construct
  REGION 1..597: note = Synthetic
MIKVYKYGLLPPTTNEALILEQISKAHKYRNILVEIERERRELVAAVVGEHTDIEPIGKELIELKAKRDELREAIKKKRATTRTRSDEPDQRQAVRDMGIKIRECVGRLKVAKTVLYASGDVTARLKAIDDRAKERIKIERAACGVYWGTYLLAEQDIDAAKREKTPPHFKRWTGDGRISVQLQGGLGVPELWGVDTQIQIDPLSPDAHDEAKPRGVRKLAQRTRLRMRVQSDASKKPIWAEWPMIMHRPIPEGARIKVATVTRYRRDCRRWDWELHLTVDIPEPEHRVLGGEGVVALNLGWCASYEHLNGGLRAGFLLSDKHESYEATVAFSVIDRIAKSESLQSIRDKNKNEMHAKMSAWFDGREDLPVWLKERIQYLHAWKSPNKFASLARQWRANRFEGDNVGYETLEAWRYRDEHLQRYEAGMLRSAILDRREKYRLLAARMADQYRTLIIDTTDLSEFQRSPRPEEERIEIDAVKLNQRRAAAFALRGALVNAFRSAGKLVIQLKAGPITMPCHACGQLDPWDRIRSREHTCSNCSATWDQDWNACANLLKVYRETGDARVVTKEVKKTRSQRLQDARRKGPSDSDGAVSS

SEQ ID NO: 293 - protein, 601 aa, synthetic construct
  REGION 1..601: note = Synthetic
WAMTRAYTYGLLPPTQGADLVATQMRLGHAYRNRLVEIERARRAQVSEILERGEPAELRTRLATLVTAHDEARAEILRSRAATRRRRGDPGQAALRDRARDLAAQIRPLRAALRAHRAHPSESAQIGIAWVQLIAYHLVREARKASGLYWGTYLLHEQAMRAAATAASPPEPIPWRGEGRVSVQIQGGMSPDDLEDGTKIQILPGRHLSAPAGTQSHAIPLAGNGDQVGLGARSARVLRIRVGSGPGQRPIWAEWPMHVHRPLPDGCPIKVATVSLRRRGTRWDWSVQIVVDDGDGRDGGAARGGAVALNLGYAIRPGDQIRAGYVAGSDGMRREILVPARVIGALDKADAIRAQRDRDLNAARAQLAAWIAGQDEASLPDWFRERTQHVGSWRSPGRLAALARDWQRGWWDDGDAGYDLLERWRLRDLHLERYETGMRSTALRRRRDGYRVLARELADRYQTLIIDDTDLRDLQEIPAPESDDDPAWPAARRQRTVASPHELRAAFMNAFGVDRVVRRSAVYVTRDHVDCGHRNEPCRDSREVTCGGCGAVYDQDDNACQNLLREPPRATGDGQTARAPTRTTRRGYRIRKGSLATRSGE

SEQ ID NO: 294 - protein, 603 aa, synthetic construct
  REGION 1..603: note = Synthetic
MLVYRYGLLAPTHNAALVAEQLRKAHTYRNVLVEIERERRKALAAAMNDSAVVDAEKLVNDRISKLAELRQKLRVMRVHGRSRRTDADELKAQVDEAKRMKNEAIAAHRVARRSAFERIKAERERIEALTLELRKGARAICDVYWGSYLLIEDADVASRKAPLWDGAELHLPRFVRWNGEGQVGVQVQGGMSVEEVTSEEGTLLQILARQTSKKGEPWDAARSPWGKLLRMRVGSTDTGKPIWAEWPMKMHRELPPHAVIKRAAILKRFIGPREEWALTITLDDTLSPPRHPDVKNGKAVAVDFGWRSLGGEAGIRVATWSDQEGHRGELAITRHQLNGLRKANELRSVRDKELEVLKARVNGWRPKLSPELQAETDHVWNWRSPKRFIRLAEFWKLHRFPADEDMFIELLAWCKQDRHLWSWESSQRIGSLRWRKDLYRCFARDMARRYEWLVIKDFNMAEFVARVPEVEHLDTEQQERARSYRHLVSPSELRLCLMHAFTGARVKLIVDRAQRTIVTESSYTTITCHVCGSVEKFDKKTELRHTCNACGTDWDQDDNACENLLKDYELLDIPSGTRESNEAYQGRWHRLKKEREERQAKQA

SEQ ID NO: 295 - protein, 647 aa, synthetic construct
  REGION 1..647: note = Synthetic
ATTVRVWRFGLLAPIENEALVRAQMRGAHRYRNTLVEIERARRDALRDAEVSAGLREVEQAYEAADARHAEAVRAAKDERARTGSRKLSELVAAEIADAKEARTDARRHFAEVRRAVLESGRLDARRTEVNALAGTLRRDARAVCGVYWGTYLLAEAAAEASFAEPLWDGAQPHDPTFVRWTGDGAIGVQFQHGASPEEITGDGDTRAQILPRAESTTTGRAGWCRVEGSRRAGRTRLLRVRVGSEGPGNRIPVWASFPMIMHRDFPPNARLKGLRVSVRPQGAHPRKGVAREEWSVEFTVEMATEYRPRASSNGAVAVNLGWRALDDGGLRVALWRATDGATGSLAWTPREVEHTRVAPGLRSVRDERFDRVRAAFVAYLERTPDAPTWLREDGRTVAQWRSVDRFASLVRRWYAEAYPTRAERVTQAEVEAWREPPVGAWTARDFAVWGSHDAHLATWRDATAKCVLRHRKDRYRTFAADLASRYAVLVLAHVDYRDLAVRPAVGEDAGHIDAAASNRHLVAVSELRQALREAFLMRGGRVLEYAPTYTTQTCYVCGAVEPFDAARAIRHTCEACGSMWDQDDNHARNLLRAHDDCERSGGGENAGAARVEIRAEKKVSERQTRRADGKARRRKEDRSQEVCEAV

SEQ ID NO: 296 - protein, 674 aa, synthetic construct
  REGION 1..674: note = Synthetic
IFVYRCGLQPPTQGADLVREQMRLAHAYRNTLTEIERARRKMLRSLGGEEEIALLAAHAATDEVCRGIAVEIKAYKSRERTRKVPPEMSERMKVAKEARKKAARDVFDFRRQRATDPAVAAAVDEVNEAASLARQVARRTCGVFWGSYLPVEAAERASRAKPLYDGVAPDDPEFVRWTGEGTVAVQLQGGLSVADLQSGEDTRLRLRLAAWGSPETVSDEPPPGWGSRRYTPEERRARWRHMLAHGGAHDGTHPGQKGPRPMGTLELRVGSANAKGERCAGGHTPVWAAWPVPPTRRSLPPDAIVKWAHVHVRRIAAREEWSLTLTIECARRESCGTGAVAVDLGWRRMEDGGLRVAVAQGDDGKVHEMRLSPCDIDQLTKADSIRSHRDMLFDLARPWLRAILDALPERPAWLDERLASMALWRAQARLAAVAIHWRSHRFDGDADAFAAIEAWRRRDKHLWSYEDHQRKGSLRRRRDLYRTWAAKLARQYGVLVLEDGGAKGETPVFDLRAFATLPEVEEVETERDERARSQRHLAAPSELRLALTQAFEGRGGQQRSVVMENSTRRCAVEGCDAVESWDAGAELRHTCKNGHTWDQDENAGANMLRLYRENRERPHDASARTTARKKEKKGKVKKDGIEGESAYARGRRLRAERQARIAAARKTSQEATGG

SEQ ID NO: 297 - protein, 602 aa, synthetic construct
  REGION 1..602: note = Synthetic
RTVEFKLSLNQSQQAQVDNWLNVQRWTWNRGLHLLEEFASFMAWDQGAKAWVACCPVPWQYYKLEVKSQRPEVEEGEDQLSVRSSEGQFNPEPQPPASYLVAFTRLAQTKPYRMSCSISQTYRQPELASPTYFGLLYYFAQKNHEDKPWFCEVPSKFVAGTLKALADAWSEYKAGKRKRPRSKRYKDKIKTLINNNSKSVKISGKQILLPKLGKVTVKTLDKRWDSSVPIATLKIVKEPSGYYLHLTGDPPEKRFKSSNKAVGISLGYRNLLTTDGGKVVEPPAYYQKMEKRLVQLQRKLSRQQNLCPITTYNPELGEHLLSCPIHPHKAANKAKTQQKIARQHEKIRRARKAFNQKLSTKLVREYGGIATAKSELQKITRRPKPIVNKEGTGYDKNGALIKSQFNKLLLTKGLGQLTTLIEQKAAVHRREYIEIAPKNLPDEPRQRAEHYSKRLRLPRAVHLASFHQGRYRAWPWELTLGESPVTPNQEATQVAALREAETTFKSSSESTNPRGLAGVPQATSLPGALEHQQTELLSPTRGKSTHADSQRQSETGPSLTASSKSEVAKGQKKARRHRAVQPTSEHTSGRRKRRSGKENDAN

SEQ ID NO: 298 - protein, 571 aa, synthetic construct
  REGION 1..571: note = Synthetic
RTVEFKLDLNQSQQAKVDDWLNVQRWVWNRGLHLLEEFDNFTSWDKVSKTWTASCPLPWSYYKDSSGQLVPFTRLAQTKPYRMSCPIHQAYRQPELESPTYFGLLYYFAQKNHKDKPWFCELPSKFVGGTLKALADAWSEYKAGKRKRPRYKRHKDKLKTLINNNSKSTNIDGKQITLPKLGKVTVKTLTKRWDASVPIATMKIVKEPSGYYLQLTGKLPTKTVKPSNKAVGLSLGYRELFTTDGGKAVSPPANYRKMEKRLARLQRKLSRQQKLCPITTYNADLGEHFLSCPINPDKGANKAKTQQKISRQHEKIRRTRKAFNHKISTKLVREYGGIATAKSDVQKITRRPKPIVDKEGTGYEQNGAFIKSQFNKLILASGLGQLTTLIEQKATVNGREYIKFAPSSIPDEPRQRAEHYSKRLRLPRAVHLASFQQGRYRAWPWELTPGESPVTPNQEATKVAALGDAKTTSKSSSETTNPRSGVDVPPATSTLNASNNQQPQPKARAGGKSTRAASKKLPETESGKATSSSKDADKQQKKAPRHRPAPPISENQSGKRKRRPAGTNGSS

SEQ ID NO: 299 - protein, 480 aa, synthetic construct
  REGION 1..480: note = Synthetic
RTVEFKLSLNQSQQTKVDNWLNVQRWVWNQGLELLERFNTFNTWDKMTRSWVNCCPVPWEYYQSKDSNQLVPFCRLPWTYYQQEKQLIPFCRLAERNHHLPQEYQDSQIQLPTFFGLIYYFAQKNHTDKPWFCEVPSKFVSGTLKCLADAWSEYKSGNRQRPRYKRYQDKIKTLLNNNAKSIKVSGRRITLPKLGKVSVKTLDKRWDNSVPISTLKILKSASGYYLQITGVMPIEKKPLPQDKAVGLATGTEAVYTTDSGKAIESPQYYRRMEKRLKRLGRQASRRQSGSANQKKTYRQLARLHERIRRSRRAINHKLSTYLVREYGAIAVNESKSVKGANSTNNKALTDNAVGQLLTLIEHKAQIAEREFVRVLTQGLPVEQQAAARAIHTTAKPIFARNYRPWGWEVTPGESIVTLNQEVPQGIPLRDAGTTSNSSSSNYQLTKLRELVDVSPTRQRLRAAKLSVENQVQKGSQKSMK

SEQ ID NO: 300 - protein, 465 aa, synthetic construct
  REGION 1..465: note = Synthetic
KTIRKSFKYRCYPNAGTKRRTFRAMYIQGEVWSNATAQKSRAWFAQQDAIYLAGKNAGRELTPEEKDVIKKQSPIPTFYDQYSLIRKREHPQYCKFDAQSLQNVLHKVDSSFKSFFALKKNGQPDVMPPNQKRIHRCLAYRQSGWKLEGNNLYLSYIGKFHLKLHRPIIGKIKLISITENNGKWYASFSCEVNILSGTCNPVSKSKSASADDLRQEYAPSGGDEPEKASTYNKRVLASEIFGGGDDPEKASTYNFLSSGSPIALGGDDPEKAGEIEIAFGLRDNVFIIDSAGFIIEHPEFYGSELDKLKRLNQNLAQKKYRSENWYKARNTLIKWHERIENKRAYFLWNLARYYAKNFEKVTIQKWPLNKEIKYAIDNKTARRLCDGAYGKFIQMLKHKCNESGTEFIERKELSWQTEIERLTEQAKMEELTRVLRESKKAVNRKYHARFKYLETACERLMMLRI

SEQ ID NO: 301 - protein, 371 aa, synthetic construct
  REGION 1..371: note = Synthetic
YYKSFRYRAYPNKGTIRRTIKIMAYVAAPIYNKANNERKETYKESKIDNSKKPVNSYRQQYRLVRKRDHPEYGGYDAQMLQNVLVSLDADWKSFFTLNKHGFKDAHPPGNKGIHRNLTLRQSGWRIEGNNLLISTIGKFKMRMHRPIEGKPKTASITLKSGKWYVSISCESEKPAEKNRKRKPVEIYFPPDTFIKDSVGLEIDFPEFYFSRIGTLKKLSRALSKKKGSKNRRKARYMVAKWHEKTANKRAYFLWQIVFYYTNNYSEIIVPKLPLKYRIQYATTSKKAMKLCDASYGLFMNMLRQKCKEKGVTFIERKDEEWGRQINKAEQAAQMEHAQKLLRKAKKAMKYQNPAHLKSLERDLKRVPILQS

SEQ ID NO: 302 - protein, 488 aa, synthetic construct
  REGION 1..488: note = Synthetic
MRKAFKFRCYPNKQTQQRLWDVMQRGVTPVWNACVAERQAVRTEYAHLCDEAICDRVYDLKRDLSPKEEKAIRKKMANQVSWPSAYSQYKHIRKRDHPEYADFYAKMLECTVAEVDGAEKSYRALWILGDTKARPPSEQRVHRVITYRLSGFKLNGSYLWLSRIGTMKIRLHRPVEGIIKTVTIREKNWKWYVSFSSEAEHFSGPCRSVSEDNPVIGRYLRQKHPITGGATREKTGAYNVLPRSQPSGGATREKTGAYNYNDHSLELSFRPHCFVEDSAGRIFDHPDFYFEGIETLRRLSRELSRKMKWHCADCDGVCEKYRTVRDTPTCWHCGSEVIRPQRSQNWYKARKRLGAHQEHIARQRRYWLWHVANFYAGHYRQIIVYEKMWKYKIKYARTGDEAIRLCDGAAALFVAMLKTKCQDFGTELILRKDVKWQHQEKDLIERAELEGLHKLMRRLQRILNDPRPVHLPFLKRASKQRPTLKRYA

SEQ ID NO: 303 - protein, 477 aa, synthetic construct
  REGION 1..477: note = Synthetic
MRTYKYRCYPGQQAQAAANRIMACVVKPIWNEAQRERQENFDARCKAKTKEEKPPKWVSWYSQRHLIDPKTHPDYEGTRYGLRDGVLAALDWGYKSCWALRKNGHKDARPPGPMKWCDWVTYRWRDCRLDGHTLRAPGIGDIPVRMHRPVGGRIKTVTIRVKNAKWYVYFSCEIENFPGACRSLSGAKARKGKGLRQKHPESGGTTPQMRGVDNENLGGYDNEDGGTTPQMRGVDNVSEALNEVTAEMWGADNFSGPRSRFPTDGCTHQSDDIVVIWLRPEEGCFLADSTGRWVDVPGFYEAGLPEERRLNRLLSQKKRRSNGPDSPEKGRNQYKARLRLAKFREHVANQRSAFLWSEAKYYATRYRQIEIISRPAKIPIQYAKDERTARGLCDGAYGLFEQRLAQKCEEYGTEFRSKERSTWLKEKEVCQEQGKMEKLQPILRKAKRKVKRRIKGLPASTRSLQRACEELTTWQIT

SEQ ID NO: 304 - protein, 425 aa, synthetic construct
  REGION 1..425: note = Synthetic
RLGAPRRYTFKLYPSAKQNETLFAQAQMMAELWNGLLHRNEEQYRRTRGQQGVMHAEGKRLLSYEDMTAEITGLRHACPDWAALSVGSARRVANALSDAFQAFFRRMKELGEPGGYETRAADWRSKKRGNPRWSERNPTRHELAGYPKYRRIAQADWLPHCFQSGCKLAADGGRRQRPNGRASDCKWRLALKGIDGSIRARGEFPEQALAWSDADLRHADGHWWLSVGVESLSSRDASGDAVTVRMDLIDTFAAVDGADVGPPDFTAVHAAQDRVDVLKSERDQRWPWPAGKPRPNSRAYREMTRRITRLEAHTTRRRRELLHEWTTAVIAQSGRINVIKPPIRDATRSARGNAKDWGGAVDLVADINRRVLSQAPASAVQMLEYKALEAGIPCVIHDVQTHVAVGRDIAATVKAGRKARRKCKE

SEQ ID NO: 305 - protein, 383 aa, synthetic construct
  REGION 1..383: note = Synthetic
DAIMDRRYTFKIYPTSEQHERMVEQCEMVGGLWNALFHMQEERYRRTKGQRGVVHDPDIKPHLSRFDMTYLIKPLRSECPEWAALSSYTPARVIEAIDGAFAAFFRRAKQDAGVQSGYPRYKSWRRGEQNWLPHRFASGCKLEHVDKTTWRLSLKGIDGPIHARGKLPGEPIKWTHADIRLISGVWWLSVGVKLESRREPGDDAVTIELQGLDYFARVNGRAVYAWQIGLVDRESDRIARLQQAISALPRGDEKTPHLRQVLAKVQGKQARRRREVIHEWTTRIVSSASHIILVAPGSVKEATVSASGDKRCWGAAVKLKAEFNRHILFQAPAYAAAMIRYKASEAGVPLVEQTHEELMIGNMAVANRQGQRRITTQLRRSAA

SEQ ID NO: 306 - protein, 384 aa, synthetic construct
  REGION 1..384: note = Synthetic
RAGLPRRYTFKLYPTAEQAAELERQAQMCGDLWNALLERQEETYRRWLQGRSERARLTFFDMTAEITALRHECPEWAELSVWTAHRVAGALDEAFKAFFRRAKAGAGASSGYPRFRPRRLQTWLPHRGKSGFAMHQMQRDGCARQLDWLVSLKGFDAPIRAMGRFPSDPLIERHLDVDLRFRDGRWWLSVATEMAARGSHGPRPTIVRLDLIDCLAHVNGHPVKAHDIGLHLDDLLAERAEVQREMAPLKRGSDDWRECAERLSRLSAKTARRRREALHVWTTSLVRQASRVSVIRPASIKHDTASGRGDERSWGAAVETKAEMNRAVLAQAPGMVLQMLAYKAAEAGIEYSETAAPTLAVGTDTVRTAKATRRARREARKAAA

SEQ ID NO: 307 - protein, 447 aa, synthetic construct
  REGION 1..447: note = Synthetic
GAPIHTPGPPGQQREIKRARRYLFALYPTAEQKAVLQRHSEMLADLWNGLLQRYEHIQRTTTQRQVWFDTAGRHSGVSYHRLTWGTYRKAEREAVVIEPGANGRPKPFTAFDMQNEITALLNELPEWKEMSVWCCHRTATKLSLAIEAFYARAKKGKGAQSGYPHYRRRSSDRLSVPHRFASGCRLTKDPRHANSWQLTLKGIPGKIHARGCFPFAVPSPSGPQRKDWADADVIWRNGKWSVSVCVKGQRSRSHGYRPVTIRFDLIAGFALVDNYPEEPPGLIQARLLQDRLADRQSDCDRLFPRGRVRRDEPDYAELRLEISRLAARIARVRANALHTWTAGIVARASAITVIAPPLEEDIRTPHGDAKSWGAHVEVVSAINREALAQAPGVTIRMLQYKAAEAGIACHVVTDPEPPLAVGRELVTAGKTLRRARRAHREEMAHGL

SEQ ID NO: 308 - protein, 462 aa, synthetic construct
  REGION 1..462: note = Synthetic
QPRIDRRYSWKLHPTAQQDARLHEQARMCTELWNALLEIDFILQNVRAWVFDKDALGPLVFDLAGNLRVVSLADILLRRQYGLRTRAEHLVTAIGAAGAIQYQPGQDIRTRLPSAYDRGYWITQLRDLQPEWLALSTWTPRQVSENLAKAWKHCFTPRAKRIPGRKYGAPRFKSLANAFAIPHRFASGCRLEHAGMHERSWWLYLDGVSDQKLWRRGRGRGDVWARGKLPSPALKWTDADVRHVDGHWEISAAVVMEQRRTLIGRGIPITVEFCVIGGLALVNNEQVELVELIKAQELDVKHANMQREFDRNWPRNKRWTDDEWNNRCEDKAEIGRLASHIARVRRNALHVWTKQLVERASVLTIIKPASIKDFTQTARGNVKNWGAAVEIVSEINRDTLSHAPAMAVQMLEYKAEELGIPCQVIEDDTPEISISKAFVASRKVSRRSARETKKGVSENEKD

SEQ ID NO: 309 - protein, 401 aa, synthetic construct
  REGION 1..401: note = Synthetic
MRRYLFKLYPVPEQRDVLHRQRQMIADLWNALKQRREDVYRREGRGLTFFDLTNEITELRHECPEWATIPAITAHRVAKHLTDAYSAFFRRVKAGEAPGYPRWQRRETASCIPLGTMGKTGWMFEQRDDNPLSWRLHYKSVTEVKDRATWIHARGSLPAGDSRKSSIMPAGREAGDQFVAQWRNADILWRDNRWWLSVCVEVEPRRQPGRFSITVAFDLLDDFVRVNGIAETPDELLDAALIQADIDRLKSERDTHWPRGKRVPDNERPELAEMAAEISALSAYVARKRRNALHVWSSRIVARASDLTIIAPPKIKQETATPRGDERRWGAQVETVSTLNRHVLSQAPATAIQMLRYKAAEAGIRCDVVADDAPNIGVGRELVNAGKQLRRARRETKRRAA

SEQ ID NO: 310 - protein, 586 aa, synthetic construct
  REGION 1..586: note = Synthetic
LRRYTFKVHFSKRRAMRRAQEEAAMRFARMAAELRNALIELCYNTYCCRCERAGAPPPVDPRVVAYAVRDRTKAEAREIIASYRRGLGGSMRRSEPQWHKPERPWPQERKEKLRATMRRREEEKRARRKAPAKPRKPPRQASVRALALAELTGEITALRWACPEWAEMPTHMQHRVADGLVKSLAALMRGDAKAPRFKRTDRANRLPLGAKGYKLAPQGRERSRAGRSRASARNWKLTVTGLPGHMRAVGEFPAEVRQWKTADLIFHAGSWWLSVCVEIERERSHGAEEVTVRLGLIDEFAHVEGATGPRWCPGEGVRACAESPHRFHDLAGGSDNAADAVADGRAGLAGIGHIGARSDNAADAVADGRDQDGCRNPRRLPPDNAADAVADGRDQDGCRNPRRLPPDNAADAVADGRVIKPFSIPQSKRPAEPVADAAADALKAERDRRYRRGSRRWRRAARRIARIEARAARRRRERHHLWTSQLVRCAGAITVIAPDIPQFTKSGRGDARNWGANVKLAAALNRHILGQAPMLAVSMLQYKAEEAGIRCDLIEDDAPEIAVGRDHVAAGKAQRRLRRAIRKDAA

SEQ ID NO: 311 - protein, 533 aa, synthetic construct
  REGION 1..533: note = Synthetic
MLRRYTFKLYPNAAQAAALTEQARMCASLWNALLEMREAFYRRAKQRGDKKTSLSAFDQGKDITELRQQCPEWAAMPRGTQERVAGDLDLAMKAFFRRAKAGAGGASGYPLFKSVRRAESIPLREPAKSCWTLTAHSAPAGDSEPGGAQDASRARREEGSRTSPRSTTTAASRARGDTARPVSWRFSLRGVPGRIKTRGRFPASPEALKTADVKFHAGAWWLSVCVEIAARIKPGTERLTVAFDLIDGFASVTDADGRCAPGLSDPFHAGGKGEFSTSDRGFSTGPCGEPLIEGETQAADRALAPRSACGEPLIEGETQGSQARGNSHHACGEPRIEGETQVSEGRAWAGMPCGEPRIEGEAQEEQGDLQPCGEPRIEGEAQAPALQSKRDSRFKKFSYRWRKETARIAKIKARMARQRHYALHAWSTRLVASAADLTVIAPPIKDNTRTGRGSKASHGAQVETIAAFNKSILEKAPAKAVAMLTYKAAEAGIRCDVVKAEDHQIAIGRDLRAAAVAAKRARRALKRAERKAA

SEQ ID NO: 312 - protein, 496 aa, synthetic construct
  REGION 1..496: note = Synthetic
RTFARRYTFKLYPSKAQEAALVRQAALLAHLWNAALEQRETQWAQECQRKPKGERKGLSKYDQGRDLKTIRANDPEYAAMGSDTMNLCLVALDDAFKAFFKRAKGGAGKSSGYPKYKSPYAIENKGADCTIWHREHRKGWRLDQAGKQFKVYAKGIPGLIKARGRFPVGMGELDLRDMRLIRVGGVWQLSVVVKMEARRVPGAHKATVEFDLIDQFASVKVGANGECLPGWEGDFQSPDEQIHPQSQWLEQQTAVDASEIGAEGRETILCATLGEAVDASEIGAEGRAAKTNDAGSIAVDASGIGAEGRDQGACVAIGMAVDASEIGAEGRRLVLMRPPRAAVDASEIQSTGDRRFKKFSYRWKQERRRVAKLKAKEARQRKEALHRWTTKLVAEVAELTVVCPPIKENTASARGDEKRHGAAVKTVAMLNRHVLAQAPAMAIQMLEYKADEAGIPFARFTPDEHKIAIGAQISSAAKAVRSTRRAIRKEKELLHV

SEQ ID NO: 313 - protein, 450 aa, synthetic construct
  REGION 1..450: note = Synthetic
SVTRRYTFKLYPNSAQLIALQEQAVLCARLWNAALEQREIQWAHECLRKSKGERKGLSGFDQQKELKFIRTNDPAYAAMSSGSLELTIKNLDLAFQAFFKRAKAGAGKSSGYPRYKSAKHADTIPHRDAYGWKIKPAGKHFKIYAKGIPHEIKARGKFPTYPIEIRTMTLIKRGGAWWASIVVFMEERRTAGAIPLCVNMDLIEKFAEVKNLSNGECLPGLTLESYSKEEQIILQSQKDKLYSSENLDNLRGDDSHAFHYQSRAESENLDNLHNDDRLTGERWSNCLGKNLENFQDISNQKLDAIRSKTDRCYKRFSYRWKQQIQRFAKLKAKQSRQRAHHLHNWSALIIDAASEIQIITPPIKQLARSARGDQRNHGAAVDIVAKVNRAVLDYAPAAAIAMLEYKAAEAGIPIIILKNNEHHAFVGQDISTIAKIERKTRRQLKKDKAA

SEQ ID NO: 314 - protein, 435 aa, synthetic construct
  REGION 1..435: note = Synthetic
QIRRYTFKLYPTAAQVARFERNLDLHRALYNAALEERIDCYRKTGKTLTRFDQSRSVPEIRKVYPEIGELQANAIIETLVRLDNAYQAFFRRAKAGAGASSGFPRFKGTHFFSSWCYPADYAFSFEQTGPSKFRIRGGGPKKDDTLGWVKARGAFPVEGWAPRTATIMRRDGGWWLSLAVQIPARREAGTATTTVHMDLIDRFAAVEMVGPTHGLRDAQTAGEADRGCSRCTNADGCEPLASPDAADVGHVPPPADQGGCGASLKSFGGRENSMSGPALADAIDAERRLDELKSECDRNFKRGSWRWRERRRIIARASARAARARKEALHVWTTRVARASASLTVISPAVSTETKSAKGTVKRPGAAVQTVASVNRAALSQAPAAAVQMLAYKAVEAGIEFREIADKTPAISIGRDISEAKKAERKARRAVRKAA

SEQ ID NO: 315 - protein, 515 aa, synthetic construct
  REGION 1..515: note = Synthetic
SISQVLTYKYRLNPRRSQHAALNEILEQQRQLFNAALQERDDFYRTHREAFLNARVYREQLTLYKKRIRAWITTARRSGQENHRDAAIRLFHEYRLFRRHKPAMPQGPNELSQSRALTQIRAADPAWAQVQRRIQRATLKRVERAFAAFFRRAKAGETPGYPKYKGREFFDGFEFDAFQQITLIPQKNRQPLPDEGSEQKQRRGSYPRLRFAGMPGGLRVFLDRELPGDPKKVWFKREGRRWYVGFQVERECAAPRQAGKDIGLDWGTSALAVLSSGEVIQNPRHREALADRLRIEERAIARKKRGSKRRLKARRHKQAIERKIRNRRKNTLNKLSKRLATQFRTVATEEFSVKAMMAQGTEQEPLRARRRNREALDAAPYMLRQMIAYKATLYGANHGMGGAPDYDQRSSTHICSGPIDDPVFPYCWQTVSKELSAEWHHCPYCGYAAKRKHNAARVILIRALYGGGPVPAGAKRGNSPVCPVNTAGLSAQTGRRPSGLHPTRSDRPLEAVPSG

SEQ ID NO: 316 - protein, 472 aa, synthetic construct
  REGION 1..472: note = Synthetic
MLLTYKYRLNPEKRQHRALERILEQQRQLYNAALCERIECYRKTGKSISEVDQSRSLTQIRADDPAFALVQRRIQRGTLKRLDRAYKAFFRRAKEGAGASSGFPKFKGREHFDGFAFDAFAQITFKDGGLWFAGMPGKLRINLDRPLPETPHEKTGEMGVWIKNVWFKREGLIWYVGFQVPAPVRENRNGLGKGAIGADWGTSVLAHLSSGEIVPNPRHGEALAQDLARTQRSVSRKAKGSKQRLKARRHLQAVQRKIANRRRNSLDKLSARLVKNFGTIAIEDIAVKGLMDAERPGETLPEFVKTRRNREVLDTAPYLLRQMLTYKAQREGATLIVVPSTNTTQECFWCGGLHFKELTDATHVCTRPGPYFNLKAPRKLNAARVILKRALACVPAPLRGAGRNAPIKNHRGGPVPGGLSGSSPVVRNARTSARRPGNTEAEQSAPGRRGVETPPLPHARGRDPKVRGSPGW

SEQ ID NO: 317 - protein, 295 aa, synthetic construct
  REGION 1..295: note = Synthetic
YGALIFKGMPRRLQLDLHQLLPDHASIRSRTLTKEGRISRVALQIEVADVHTVRQKAGNLVGIDWGVERLVTLSTGETVANPGFGAAAARRIGKAQRKLARAARGSRRRLKAVAHLARRRRGLANRRKSYLHQLTAAIAARFGATAVEDLKVKRLTTSAKGTVERPGKNVRQKAGLNREILEVSPGMMISMLRDKAERAGGWFAMIEASNTSQERSQCDRTVQKDLSVRIQKMRALPDGGPPRRQRGPERPETGRSGSVERLCARKQRPGCRPSLRKPQARSSPPNSGKDFELRH

SEQ ID NO: 318 - protein, 634 aa, synthetic construct
  REGION 1..634: note = Synthetic
GSNLPLNTVRVTVDVAAPVRLDVSGLLLAGDGKVRSDADFIFFNQPTGPGVNYRSGGGTAPDSITVDTGSVPPGIERIVITASPDAAGQTFQGIEPTATVRDAASGAVIASFTPPQLGAETALVVVEVYQRGGVWKVRAVGQGYSNGLAGIATDFGVSVEEEAAPAAAAPAPVVHRHRSVVGKVKTVSVKREGKRWYVVLTAVQPRPEPLPATGSVVGIDVGIANFLADSNGEFVPNPRHGRANAEALAEAQRRVAVFPRVRRDKRTKKHRAAVAKVAALHGKVRRQRLDHAHKAALRLVRVHDAIAHEKLSIANMVRAPKPKPDPDEAGSFLPNGAAAKAGLNRSIHDAGWGVFLAILTSKAESAGRRIIAVDPRNTSRECPECGHTAKENRPTQDTFHCQACGQGPISTPTHQPRPAPIPARPAGGRSAPAARTTSKSGRCQRPRTPVELDESQGGRRSPGFTPGLLIPPTNPSPPREWLTHAPGMPRPPLSPSEGQSVSNAVIRRIAASKKTLAGTVLALGVAGSMLAAVPAQAAPMNAKAIAQQMIKDPAQFAAFNNIVSRESGWNHTATNASSGAYGLVQALPASKMASAGSDWKTNPATQIKWGLDYMNSRYGSPTGAWSFWQTHHWY

SEQ ID NO: 319 - protein, 512 aa, synthetic construct
  REGION 1..512: note = Synthetic
PAPRRGRRRRPRRRSPQPLPRLLGPGPAGGLVPVVGLPEAPGAGGAAVAGVHVVQAPLDLGGGVGLPVRAGGGHLRGREGLDEAVGAGGGVRGGVVPAAFAGNDVVERRELGRVLDHLLGDRLGVHRGGLRGDRGKHGTGDAQGEDGAREGLLGSGDAADDGVGHGLTFRRGQGRSRHAWGMREPLTRRRGVRRRDQETGGEPGGSASALRLIQFYGGSRPLATTALTSGPRSRGGTAPRRPGGYRCRSGLVCGGGYGTLVHRHRSVVGKVKTVSVKREGKRWYVVLTAVQPRPEPLPATGSVVGIDVGIANFLADSNGEFVPNPRHGRANAEALAEAQRRVAVFPRVRRDKRTKKHRAAVAKVAALHGKVRRQRLDHAHKAALRLVRVHDAIAHEKLSIANMVRAPKPKPDPDEAGSFLPNGAAAKAGLNRSIHDAGWGVFLAILTSKAESAGRRIIAVDPRNTSRECPECGHTAKENRPTQDTFHCQACGRRHRGHHGAVAGDERGRGLR

SEQ ID NO: 320 - protein, 487 aa, synthetic construct
  REGION 1..487: note = Synthetic
EFPRDGDGCRWDSTPHAPVTRVRFQCVGHVKVHQHRAVVGNVKTVSVKREGGKWFVVLTAERAQPERLAPTGSVVGIDLGIANFLADSGGSFVARPRYGRKAAEKLEAAQRALSRYPRRKAHDRTANHQRAVEKVAELHGKIRRQSLGHAHKTALSLFREHDFIAYEDLKIRNIGKAPAAHHRTAPRPRPGVRCAAHPAPCRRHRPGYADGGRRGRMGRMTSETGYLLDNRQREAGRRFDALAELFDPWTLDHLDHLGPAAGWRCWEVGAGGPSVPTALAERAGPTGQVLVTDIDTSWLTELSGPAAAPIEVRRHDVARDEPPGGGFDLVHARLVLVHLPDRAEALRRMAEAVRPGGWLVVEDADPALQPLACPDERGPAEELANRIRRGFRALLAERGVDLAFGRTLPALLRGAGLHDVRAEGCFPLTSPACRELEAATVRQLRGRLVAGELATEEEIERHLDHLRGEAMDVTTAPLITCWGRRPH

SEQ ID NO: 321 - protein, 311 aa, synthetic construct
  REGION 1..311: note = Synthetic
VNWFDTVDFPKDGDGCRWDSAPHDRVTRVRFQGVGHVRVNQHRPVVGKVKTVSVKREGKRWYVVLTAGQEQPGPLPETGSVVGIDMGIASFLTTSNGEHVANPRHGRKAAAKLEAAQQALSRFPRVRRDKRTANHQRAVDNVARLHRKVRRQRLDHAHRVAVDLVREHDVIAHEHLKIRNMVKVPAPKADPDQPGSFLPNGAAAKAGLNHSISDAGWGGVPDDPARQGCKCRTGSDRRGPSQHLSDLPRMRARRSGEPAHPGEVPLRLVRPHRARGHGGRPKRSTGRAGPSRRQPGIATSPLVYEGEESPS

SEQ ID NO: 322 - protein, 510 aa, synthetic construct
  REGION 1..510: note = Synthetic
GASIKRVELKRAFKFRLYPLAVQEAELSEWERQLRKLYNLAHEQRRNSLLRHREWEFVKGHCPSCGVSNEAKPVVHTAACDYVDYFRQSKEMTALLAVDDQLARVVCCARQEILRDLDKAWQGWRKLGRGLPRFKRHTDSCRIYLSTTKHWRIDGRYLELSGTAGSVGKIRIEQDRPWPEGAVLTSCAIVRDVDEWYATFPVTYTADVVQAPHRSVGINRGMVHAIADSDGRVIDSPKFYERALDRIRKRSRDLSRKQPGSANARKAQIKLAKAHQKVRRQREIWLHQQSAHYVKKFDLVAIEDMGVQSMVQHHSEDGICVRGTCEEPVFKRGLCKGHYEASRVKQVPAQDMARGILDVGWYELGRQLEYKGAAHGCEIRKVDPGQFPPEAELRDDQAPAGVSTQCSACGRTLDKPASGRRWARCPECEMKQPGDVNAAENVLVRAMAMTPKAPKTPKASIKIKGRKRSEAPANRVGEASGGDPPVRGPVEGGTRERVVDPERGNAVAAE

SEQ ID NO: 323 - protein, 568 aa, synthetic construct
  REGION 1..568: note = Synthetic
VELHRAYKFRLYPTPAQVAELSECERQLRRLWNLSHEQRLMALGRHLRPAQPVECRSCGAVRAKGDDDDKTEHLATCAAHEEIARDKTWKRWTTQSECRSCGALKGADGKIEHTESCAFVDYYRQAPEMTELLQGGDDQLARVVCSARQEILRDLDRAWQRWRKAPQQWGKPRFKRRGDRCRIYFSNPKAWKVEAGSLSFAGAAASVGQIRIRQDRPWPGDAKFSSCHITRDGDEWYAVFPLVFSKEVVRPTGGAVGINRGAIHAIADSNGRVVDSPQFYARALGIIRHRARLFSRKVPFGHCVKPSPTKYRGFSPAVVDALARDLATSPGRVVYEAQKRGGLEAARTYLLANPPAPPRATLSIPSDGRNRERARQYLARAHQRVRRQREWFLHNESTHYARRFSTIAIEDWSTKGMTSSEPEGDEPRSVVRGRNRSILDVGWYEFGRQLKYKVEPTGGEFVPVDPGLMETETVVPAATTRERGADASLLKGEAGISRTCSSCGGLLPEAASGHREAECQLCLTTRLGDVNAAVNVLRRARRAPGDAPASAKKKRVTIGIKGRKKRAA

SEQ ID NO: 324 - protein, 431 aa, synthetic construct
  REGION 1..431: note = Synthetic
ELKRAYKYRIYPTKPQRIMLAEWEAQLRWLWNLANEQRVSFAKRTRADRAKAFEQGIKPPDYFSQSKEMTSLVAEDARLAAVPSCVRQEILRDLEKAWQRFRKGLGGKPHFKRRNDAMRAYAPDKTGWSLTMPDGRFGSIRFRGIGNVQARIDRPLEGVASSCILVRDVGRSVNEHEWYAIILCTSTIHDPAPSKLPPVAINRGVHVLAATSEGILHENPRFYEKKMDLLARRQRQAARKAPLPGQPASKNYLKALHRVARLHQKTRRQRAHVIECLSKQLVEHHGLVAIEAYDTKGMLEKKIEDKPAFVSRAVHRGIADSAWGMLGIKITNKSVPLGVRVEKFSPVDKSRKCNKCGHVDEASMRGREFRCTKCGHEDHIDVNHAKNGLEDALAAANSPPAAPKTRKKTSIPGRRKASATSGPLPDADSGG

SEQ ID NO: 325 - protein, 351 aa, synthetic construct
  REGION 1..351: note = Synthetic
VRLRRRSGQSTRLSERKLLRRPRPSRPRRTPAFHCDVEAERHQTRHHKQPCSPLKKVRTTRNTRERGNTSLSNTRHAPASRSRTYSRFRAVYDSTKERWELHLVCKDEIETPNAPGNETAGIDLGISNFAAVAYSTEDADLYPGNRLKQEDGYYFPKEIAKCDDSGGDRATRLHHKWAERRTHFFHSLAKHIVERCVEKEVGRINVGDLEGVREDENGSSKKLGQARESRLTRVGVRPLQLDSEYKARVEGIEVLEVSERDTSKTCCTCGKTDDSQRVHRGLYVCDECDAAFNADVNGAENIRLDSNESNSKSAPDLGGDRSTGWLAQPGVYLHDLSRGFQPRTEVVDCKP

SEQ ID NO: 326 - protein, 298 aa, synthetic construct
  REGION 1..298: note = Synthetic
VFASKGANHKEHPRAWEYILVEYETRPGVTVENLQQVRAVYDSTKERWELHLVCKDEIETPNAPGNETAGVDLGISNFAAVAYSTEDADLYPGNRLKQDGYYFPKEIAKCDDSGGDRATRLHHKWAERRTHFFHSLAKHIVERCVEKEVGRINVGDLEGSVKMRTAARRTGASTGISTYTGGRSTASARFSNTRRESRESRSWKCLSGIRARHVAHAGKQTTHSVHRGLYVCDECDAAFNADVNGAENIRLDSNESNSESAPDLGGDRSTGWLAQPGVYLHDLSRGFQPRTEVVDCKP

SEQ ID NO: 327 - protein, 436 aa, synthetic construct
  REGION 1..436: note = Synthetic
LEVHRTHQAKILNHSQGEESLDRHGWSASKLWNVANHHSRKVWKETGEIPGHGDLKDELKTHPKYNGLHSQSSQRVLEELAEAFNSWYGSDDDRDNPPGYRKENYYDDQGRRVHEEHPRSTVTWKQNGIKHDTTNNRVRLSKGANHKEHPRAWEYILVEYETRPGVTVENLQQVRAVYDSTKERWELHLVCKDEIETPNAPGNETAGVDLGISNFAAVAYSTEDADLYPGNRLKQDGYYFPKEIAKCDDSGGDRATRLHHKWAERRTHFFHSLAKHIVERCVEKEVGRINVGDLEGVREDENGSSKNWGKHGNLDLHGWAFDRFSSILEYKARVEGIEVLEVSERDTSKTCCTCGKTDDSQRVHRGLYVCDECDAAFNADVNGAENIRLDSNESNSESAPDLGGDRSTGWLAQPGVYLHDLSRGFQPRTEVVDCKP

SEQ ID NO: 328 - protein, 439 aa, synthetic construct
  REGION 1..439: note = Synthetic
LEVHHTHRAKILNHSQVAEMFDQHGWSVSKLWNVANYHSREVWEETGEIPDHGDLKDELKGHTNYKGLHSQSSQRVLEELAEAFNSWYEKRKSDSRANPPGYRKKNYYDSEGRRVHEEHPRSTVTWKQNGIKHDPKNNRVRLSKGANHKEHPRAWEYILIEYETRPGVTVENLQQVRAVYDKAKGRWELHLVCKDEIETPNAPGNETAGIDLGICNFAAVAYSTKEADLYPGNRLKQDGYYFPKEIAKCEDSGGEEATRLHAKWSERRTHFFHSLAKHIVERCVEQEVGRINIGKLAGVREDDNGESKNWGKHGNLNLHGWAFDRFSNILEYKAKVEGIEVVEVSEHNTSKTCCVCGREDDSQRVERGLYVCESCDAAFNADVNGAENIRLDINEESNSESALSSGGDRSTGWLAQPGVYLYDLSSGFQPQAQVVDCKP

SEQ ID NO: 329 - protein, 349 aa, synthetic construct
  REGION 1..349: note = Synthetic
LHSQSSQRVLEELAEAFNSWEETRKSDSRANPPGYRKQNYSDQQGRRVHEEHPRSTVTWKQNGIKHDIKNNRVRLSKGANHKQHPKVGIHPCRIRNPAWRHRREPPTGQSSLRQGQTAVGTSPRLQARNRNSRPTRHRDCWYRSRFGICNFAAIAYSTEEADLYPGNRLKQDGYYFPKEIANCDDSGGDRATRLHAKWSERRTHFFHSLATHIVQRCIENGVGRINIGNLAGVREDNNNGESKNWGKHGNLDLHGWAFDRFSNILEYKAKVDGIEIVEVSERDTSKTCCVCGRTDESQRVERGLYVCEEHDDAFNADVNGAENIRLDINDESNSESAPDLGGDRSTGCG

SEQ ID NO: 330 - protein, 313 aa, synthetic construct
  REGION 1..313: note = Synthetic
VTWKQKGIRHDTKNNRVRLSKGANHKDHPRDWDYVLLEYKTRSEVTVENLQQVRAVYDTAKGRWELHLVCKHEVEKPDAPGTETAGIDLGICNFAAVAYSTEEADLYPGNRLKQDGYYFPKEIAKCDDSGSSEATRLHHKWSGRRTHFFHSLAKHIVEKCIERGVGLINIGKLNGVREGENGESKNWGKHGNLDLHGWAFDRFTKILEYKAKVEGIEVGEVSERDTSKTCCVCGRDSQRVERGLYVCEACDAAFNADVNGAENIRLNSNKSNSESSARLDEDRSTGWLAQPGVYLHDLSHGFSPREQVVDCKP

SEQ ID NO: 331 - protein, 339 aa, synthetic construct
  REGION 1..339: note = Synthetic
LDQRRLGRNRPPEHDELTALKNSERYDDLRKVSEFCKNSLKRSTHGTANEPTEPRAIPATANTATNTHGSTITFKNKGFKLDTENNRVRLSKGKNTKDYWSDFALCARPDVDLPTVESVQQVRAVWTGDEWELLRLPRRNRNAGAPGESTVGIDLGIFTFAAGNRGIVPAWLSERRRLLLRHIANCGDSSSGGQSNSTVSGRIAVTHSLSRNTSSNGVEKRVGSITIGDLSGVREDEDDEVKNWGTHGNLDLHGWAFDRFTNILTYKAEMQGVENPVSSVTRRKRARVVGGDSNRVSVGCTYVIRELVAECECERVASESVGWPRIECPLVGAAFDSLV

SEQ ID NO: 332 - protein, 441 aa, synthetic construct
  REGION 1..441: note = Synthetic
ANQVVTRTYRARICNYSQVRDDLDSLGFAASKLWNVGRWTAQRIWDACGQIPGANALTAYLKNHERYADLHSQSSQRVLQELGEAFTSWYGKRGNGDTNANPPGYRKHNGDHPRSTVTFKQAGFKHDAANDRIRLSKGANLKHGWADFVLCEYDVIGPASRTVENVQQVRAVYEHGVWRLHIVCRVEIDARDAPGDGVAGVDLGICNLAAVSFGDEAVLYPGGALKEDKYWFQKERAKCDSSASREASRLDRKRTARRTHFLHTLSKEIVQQCVERNVGTIVVGDLGGIREDDESGGARNWGDHGNLDLHGWAFDRLTTMLEYKPEAESIDVECVSERDTSKTCSACRRSADRQRVERGLYVCDCGFVGNADCNGAENIRRKVLPNLACDGGDRDNGWLAQPAVRLGNPRPSGRGGCQFGGVRGAGGRVDGVPKCLTDIAE

SEQ ID NO: 333 - protein, 701 aa, synthetic construct
  REGION 1..701: note = Synthetic
PERDRPPLARLDEQLRIRGGIGGRRRAEEFVRVLSDVHRAVHAAPQGPERPDLLGEDELVDRDDERRTGDDRPDEPLEHGLDHMSLDCIVERSDTGSRRPQSMNTRKIPKASPPASARRLTSISRWNQYGFLSVRSRRVSFAEGSLMPDGGFGHQQFRAVAVVADRVAELSLIGAEPVELPLRVDGLPFGQPLRRFERLVLPLSWGVGDHAPKPDVTALALVQELRKFKEKASPFRAGMNPTWFSASADDGRAGYSTFTFTVHRSELSTYGDIGYVWRNRSSRAPTAHASATTRRCATTSIRSDSPPASSGTVADGRPNVSGTLVARFPAQTRSWRTSRATNATPTYIHSRVSEFFKNSVRRLRVGTSSVETGTRTRIRPATANTTATTRARRSRSSKRASSTTPRTTAFASQKAKISKTGGATSPSASTTLSARSVEPSRMFNKSVRCTKMASGGCTSSVASRSKPPDAPGDGMAGIDLGICNLAAVSFGDEAVLYPGGALKEDEYWFQKERAKCDDSSSAEAKRLDRKRTDRRTHFLHTLSKDIVAECVKRSVGTIVVGGLGGIREDENGDTRNWGDHGNLDLHGWAFDRFTQMLEYKAEAEGIDVECVSERDTSKTCSACGRSADRQRVERGLYVCDCGFVGNADCNGAENIRRKVLPSLARDGGDRDNGWLAQPAVRLFDRSEGRFAPREQVTDCEP

SEQ ID NO: 334 - protein, 719 aa, synthetic construct
  REGION 1..719: note = Synthetic
KKAASIPLSRANSSIPPRQSSPPSKRQTYSPAGVTSRWCMSLSLAGGHHKGTGSPAVVSGRESTLAGRGRPREIPLPPPAYLHRRESSAVQGVNESLCDPFAHQKSKTSGDVDETPRVSFASRRNFVPADSSEIKDFRDTRTRSVPGTDVNRVDSVAQPPEPATRIFHCNPFVGQPTLTTYGRPGRHPHPRRHRLQPAAGVKRPRSSRVRRPQKLKISDGLHESEALVNASKLWTIARWTAERIWSETGHVPSHAELSAYLKFHERYADLNAQSSQRVLQELAEAFKSWYGRRQNGNSESDPASIPQAGRPAPSLDGHVQRGRIQARPRQWPYPAVEGSQPQGRVERLHPLRVRRRPRREDRERSAGPGGVRARRVAASHRLSSRNRPDPRGDAVAGIDLGISNLAAVSFGDEGVLYPGGASKEDEYWFHKKRAECDDASPAEAERLDRNRADRRTHSLHALSKDIVERCVEHGVGTIVVGDLSGIPDGENWGDSGNLGHGWAFDRFTQMLEYKAEERGIDVERANERGTSKTCSACGTEDGDQRVERGLYVCESCDTVTNADINGAENVRQSLAPDRGDRDNGWTARPAVRLFDKSTGRVTGREQVVDCKPYYPDYGREIPASSATSDCPRDVVPRCSRRGGCHRQARSAGASDTSIASQAPSSVMSAITYSCPEPASSTEATTSPFSRVMVDAPMPTSSTYRYISPSEPAGGFSPDR

SEQ ID NO: 335 - protein, 442 aa, synthetic construct
  REGION 1..442: note = Synthetic
SRTVRTFEATITNQQQVRDNLDQLGWAASKLWNVGRYYAQEQWDETGGIPDDGELKAELKSHERYTDLHSQSSQRVLEELAEAFNGWFGKRRNGDDRARPPGYRKNGDAHPRSTVSFKAAGFKHDAQFTRVRLSKGRNLKEHRSDFILCEYQTRPDIDLTEWDIQQVRAVYKRDEWRLQFVCRTAIDPEPPGDEVAGVDLGICNFAAVSFGGESVLYPGGALKEDEYYFTKKKAKCDDSSSREVTRLDRKRRGRRTHFLHGLSKAIVEECAERGVGTVVVGDLGGIREDNENGKSRNWGDHGNLDLHGWAFDRFTTLLDYKAEAEGVEVELVSERDTSKSCSACGYTDDDQRVERGLYVCEKCDTVANADVNGAENIRQKVLPSLSTDGVDETHRVSSAHQNAKRSGDGDRDNGWLAQPAVHLFDRSEGVFAPREQVVTREP

SEQ ID NO: 336 - protein, 295 aa, synthetic construct
  REGION 1..295: note = Synthetic
GLARGQVAGYGNPREDSDRINNLLRKSVCEYAADPDVDVQNVQQIRAVWNGDKWELHIVCRVEIETADAPGDRVAGIDLGICNFAAVAIGDEALLYPGGALKEDDYYFQKERAKCDDSDSRKARRLDRKRDQRRTHFLHAVSTDMVAKCAARSVGTIVVGDLSGIREDADWSDHGNLDLHGWAFDRFTEMLKYKAAERGISVERVDERGSSKSCGCCGTTDDSQRVERGLYVCDECDLVANADVNGAENIRQKVLPSLACDGGDRDNGWMAQPAVRLFDKFTGRVRPQEQVCREP

SEQ ID NO: 337 - protein, 310 aa, synthetic construct
  REGION 1..310: note = Synthetic
GPRESTSPVSCAHPWSSSDTNTAGTMAAAELRAVARLRARWSRRWTVGRQVGSLRSARDVTVGNIQQVRAVWNGDRWELHIVCKVQIPVEDAPGDNTAGIDLGIKNYRAIADDDGDAESYPGNVLKRDKHHFTRDEYDTEGENGLSKRALRARQKPSRRKDHFLYAPGKHVVEQCIDHGVGRIAIGDLSDIREDETGDSRNWGKRGNKKLHRRGFDRFATLLEYEAEEHGILVDRESERDTSKTCSCCGRRLDILPALKHGAFSSHFRNANRVERGLYICESCGATICGCECCSEYPQKDNSGSSHRSYE

SEQ ID NO: 338 - protein, 583 aa, synthetic construct
  REGION 1..583: note = Synthetic
GTRQRTRQATERTAATTHAPPLRGKTKGFKFDPNGYVRLSKGPNAKGYWSDYILCAIDAPPTMPDPERIDVRQARAVYDEGQGKWELHLVCKVEKDAPDSPGDGTTGMDLGISNIAAVSFGNETLLYPGGWLKQAKHYYKQIEYECEGENGLSDRARWAKRKLRRKREHFYHVLSKRIICECVERGIGTLRVGDLAGIRAEENGDGRNWGRHNNNKRLHAWAFSQFTSMLEYKAEAEGIEVVVDTERDTSKICSVCGRERKANRRHRGLYKCDRCGFVGNRHDSTEFDSPLRPDRPGNAFKPEVEPKEGEAVLGKEVNSGFVGTDLEARLHGVGAERVTLVGLTTDHCVSTTARTAANLGFETVVVTDATATFDREGPSDVELSARESHDAALAHLHEEFASIVDTADLLWSSVGATRSARLLNTGEQGTGECFREGVNSAPKGARWCCSSMGIATNAIASTVRSARTGRTSRRSTRTNARSSPRRTSSPRPSGWAHLGPRLQVVSPRKRWNGPVAISAYSRTNTAPSTTLTSIRESPAAGRTCAASPRQASTRSAFTHPTSSGAICTAPTGRISSMSRARRA

SEQ ID NO: 339 - protein, 426 aa, synthetic construct
  REGION 1..426: note = Synthetic
STVRCWRQLAHIEGKIVNHQQVSDDLDDCGFAASKLWNVARYYTQGRWDKGGEIPDDGELKSELKEHERYSDLHSQSSQRVLEELAESFTSWYKARQRGDENANPPGYRKHGDEHPRSTVTWKQKGIKHDAKHNQLRLSKGFNLKQHRSDFILAEYETRPDVTVENIQQVRAVWNGDRWELHLVCKVEIPAEDAPGDNTAGIDLGIKNYLAIAYDDGDAELYPGNVLKQDKHYFTRDEYDTEGENGPSRRVLRARQKLSRRKDHFLHALAKHVVEQCIDHEVGRIAIGDLSRIREDENGDSRNWGRSGNKKLHGWEFDRFTTLLEYKAEEHGILVDRTSERNTSKTCSCCGRKREANRVERGLYVCESCGATMNADVNGAVNIRRKITQSPPTGDMSNGRLARPVAYLFNQTSGRFAPSEQVGCKP

SEQ ID NO: 340 - protein, 261 aa, synthetic construct
  REGION 1..261: note = Synthetic
VTWKQKGIKHDDKHNRVRLSKGWNLKDGRSDFILAEYETRPDVEVENIQQVRAVWNGDEWELHLVCKKEIPVEDAPGEKTAGIDLGINNYLAIDYEDGASELYPGNVLKQDKHYFTREEYQTEGENGPSKRARKARRKLSRRKDHFLHTLSKHIVQRCTDEGVEKIAVGDLSDIREDENGDSRNWGQSGNKKLHGWEFDRFVRLLEYKAEEHGILVDRVDEENTSKTCSCCGQIRDSNRVERGLYVCDSCETTMNADVNGG

SEQ ID NO: 341 - protein, 450 aa, synthetic construct
  REGION 1..450: note = Synthetic
ETTQRTLVTHPRNHQQVKRQVDPHAWDASKLWNVGLYHLYEWLNNDNLPAGDLDHALKEQLKTHDKYNGLHSQSSQQVLEELATAFSNWLSSNDTRDSPPGYRKENYYDQDGNRVHEEHPRSTVTWKQSAIRHDEQNHRLRLSKGANHKSSPRACEYILVNYNTPDYTDIGDITQVRAVWNGDKYEIHIVHEVEIPDDSPGERVAGVDLGICVPAAVAYPDEAAIYPGNTLHEDRHYFSREEYQTEGPNGPSTRAERARETLSRRTDDFRHKLSHEIAETCVEKNVGQVIIGDPSGVEDDDWGRHGNKRLQNWAFSKLAGLIEYKCRERGIEVELVDERGTSSSCSRCGHEADACRVERGLWECSSCGVVMHGDVNGADNIRQKSISAIPPLAETVDSANGCVAQPVVYLFDRTRGFQPRHSEGSCKPNHSNSVSSSPNNATRETGSPPL

SEQ ID NO: 342 - protein, 375 aa, synthetic construct
  REGION 1..375: note = Synthetic
MKNQSCWKDLNAQSSQKVIEELSDAFQSWFDLRQTDDKANPPGYRKHGDTRPKSTVTFKADGFKHDPKNNRVRLSKGSNLKEHWSDFILCEYQTRPNIDLSEVNKVQNVRAVWNGDEWELHFVCKVELETNDAAGGVAGIDLGITNIATVAFPDEYVLYPGNSLKEAKHYFTRAAYETEGENGPSETSMWARKKLAERETHFYHVLTDTIITECVERGVGTLAVSWPEDVRNSDWGKTGNKKLHSWAFDRLYQYLEYKGKVRGVEVLKENEWNTSKTCSRCGDDTTSNRVERGLYVCSSCELVANADCNGAENMRQKITPSPHGEDRSNGCVVVREILRSLVITKGASAFRTTQPSVHLFDRESGTFTTREQVVS

SEQ ID NO: 343 - protein, 418 aa, synthetic construct
  REGION 1..418: note = Synthetic
KVLRTEKCKIENYSQVVDRIDELSISVCKLWNVARYKCEREWRKTGKIPSESKLKSKLKEHRRYRELHSQTAQNVIEELWNAFKSWFEKRKNDSKARPPGYRRKNGRYPKASVTFKKSAICHDKKNKRLKLSNGRENSSLLVEYKSRPEVDLDRIQVVRLAWNGDRWQIHITHRKEIEPQSPGAQVCAIDLGVNNFATIVYDDGTSELYPENKLKEDEYYFLKKIAKCNKSNSNKARRLHKKRGRRREHFLHALSKEIMGRCEEKKVGRIIVGNLKSIRENETKNNNNYNLKLGQWPYEKFVQLLTYKAEKTGIEVVKMDESHTSQKCPRCGVIDRKNRVERGLYKCSNCGFTIHADVNGALNLLQKVTALSGSNGSVAEPVVNLFAVRSGISPSGCEEGKFHQAEQLQTLNSQPHTP

SEQ ID NO: 344 - protein, 437 aa, synthetic construct
  REGION 1..437: note = Synthetic
PTQALTYICKIKNHDQVAQALDRMGLACSKLWNVALSHTRQVWEETGKIPSAYETQKAVQEHYWFKQLPTHTAQAVTQELWRAYKSWFGHRRNGNPQARPPGYRKRNGKVPLSTVTVKRYGFRLEGTTLRLSRGRAVASETGERHLYLELALPPGAETEQVKQVRLVSRNGVWKVHLICEVPVVETSPGKGVAAIDVGIINLAAVVYSDGSTELYSGRGLLTQEYYFAKEIARCKPSGWRPGSRKRAASKRERKLYRKRTQRRRQFLHTISQRIVDTCVEKGVGVIILGDLKGIRRQANGEARSHGKVGNLKLHAWPFDTFAQMLRYKAKLAGITTVQVSERNTSRTCSVCGRLAANSRVHRGLHVCAECGATVNADINGAINILRKYLHGLDKSTGVPVRVGSSLLPTIWPEPSVNRYDWGKPNPLVHVAGSAPAA

SEQ ID NO: 345 - protein, 438 aa, synthetic construct
  REGION 1..438: note = Synthetic
CGVAGDVAQRRRLVGLLRAGGDVWAALIEVNQARFRRHARPIFGYQAWCREIAGVEVGELSTAAMCSVVRRYSSACFEVAKRKRTGERAHYPRRKRGLVPLRWRTGTFTVEDRRVRVSMAQGAAPCWLRLSRPVPYPPASVRSVTLLVDAGRLVLDVTAGFDVEDHRLDPTRVAGVDLGIIHPIAVRSTEEALLVSGRALRAEDRLHLADTKARQRKMDPKKPRRGQRGSRRWRQLRAKQRRAAAASKRRVHQAHHEAARMLVDWAIAQRVGTLVVGDPQGITNQDAGVVHNRRLRTWRRTHLMRTIIDKAAVAGIAVERVDERGTSSTCPRCRRRVPKPSGRNFACPHCGHVGHRDLVAAHNIAARSGGTITTTPVVVEHRRVGNPTQRRDRRRHHMDQRRSCPAPGRPANPDGESLAAHQACEDQPTPRPNSANVG

SEQ ID NO: 346 - protein, 635 aa, synthetic construct
  REGION 1..635: note = Synthetic
LDHHLGRHPVPVIVTGSVLELGERGPGMIGALVRGVGAVVRHLGVVAGDAGERGADRVEGGEPLDVLVRDLVHARHDSPFERKVSLARVRLHGFERGRPEVVETGVLGSRARISEELLAEQPRTFLGGGVVADSRELEEGGVGQGLGREAPVVRRGRRVVLAHEIAAGCLGLLVTPHSYRLRMRSVHRTARVGLRLTRGQSRRCFGLLRSAGDVWAALVDVNRHRFARRAQPIGTCQAWCREVAGVACGELSVTAIRSVVRRYSAAFLETGRRRRKGERARYPRRKRALFPVRWYQGTFVLEHRRVRLSVAKSAPALWLRLARDIPYPPAQVRSVTLVCEAGRLFPDVTAAVPVADHDLDPARVAGVDVGIIHPFAAASEQEALVVSGRVIRAEERVHLADTKARTRRMATKTPRRGQRGSRRWRKLRAAQRRAETKHRRRVRLAHHQAAKTVVTWAIEHRVGTLAIGDLAGIATDDAGRHQNLRLRQWRRTHLVGALRDKAEAAGVQVVMVDERATSSTCPQCGSRTAKPRGRNFACPSCGHQEHRDVVGARNIAARSGGTTRTPVRVTHRRAGQPPARRDRRRHLWDLRRSSPAPGRSATAGSRSPANPTEAPAPATVHDHPDGHPARITQAA

SEQ ID NO: 347 - protein, 450 aa, synthetic construct
  REGION 1..450: note = Synthetic
ENCVVRTFRVKVMSSPAKERRAKEMLVAAGDAWAWTIDRFHRRRRDDLPASNSNIEIWPDLRAHGSFGELTMHCSQDIAKCWSANFFAAKRRQKRGEEASLPLAKRYLMPVSWRKGEFSLTVESRFPDGSRRRPSVVLATARGCEPLSLSLSHDHPYDQAAVRAVRLLEDAGELFLDVTAWVQIVRAEVDPEMIAGIDPGIIHPLAIVTGEKALLISGRATRAEEFLHLEDQKGRDVCQSRYRAPVRARKGRPHQPGSRRWRKIAERKRREEAKSRRKVRLAANRAARVAVGFVESNHAGVIAMGDPSGIEQRDSGRVQNRRTARWLRASARDAVRYRAEERGIAFLAVDERGTSSRCPSCGEPAAKNGRRLICQGPLCREEHHRDIAGVQNIAQNSGAVVTRVALIEHRRVGQPSRRDRRRRRYDASRGEARTWAVEAGLPATRSLVAS

SEQ ID NO: 348 - protein, 325 aa, synthetic construct
  REGION 1..325: note = Synthetic
PCTGQESARVELAPEGEQRTWFSRSPTTPLRPRARAFRAPLVSQAGELFLDFTAWVAVVPAKATSGLIAGVDPGIIHPLAVACGSRALRVSGRGVPAPRGLQSPRDQELDQARPASGKARVRPPSGLACVAQAARPPEVAESKSRRVVKLASNRAARLAAGFLEQAKASSVVIGEPGGVRDNDAGAVQNRRTHRWLVVHTTRALCYRLEEVGIAAELTEVSGTSSHCPRLRGCGRVLVCTDPARGTVHHRDVAGAQNMVRKLGRAPSLIAHIEHRRVGTPARRDQRRVSYELSSRTTPEVPARTRATTVASAGVESLVAWRRGLA

SEQ ID NO: 349 - protein, 620 aa, synthetic construct
  REGION 1..620: note = Synthetic
AAGRSLPYPAEQVRAVTLLADGGRLWLAVTAAVPVQQHHLDPSRIAGVDLGIIHPYAVVTETSGLLVSGRALRAEAYLHLEDQKARQAKAARRAPKPGQRGSRRWRRHRGRLRRVEARHRRRVHQAQHEAAKQVIAFAVQQRIGTLVVGDPTGITSRDAGRVQNSGCGGGAAPTLCRPCLTRPNRQASWCGWWTSGAPPPPAPPAGDGSPSPAAASFAVPPACSRGTGIWSVPTTSPPRPAPDPRAQTCRCSSSTVGPASCRHGVTVAATSTTSGGDGPAWPRATQASKRVRLAVARRTRGSHPRLARIKHPYPAPGQRLPEGAVASFRFAPDVDDGLVDGAAGGPGGARHGGDRVPGADAAGDQRGDLGGQVGHTGRARPRRRRATDDQRQLAARAVGRKPLRHLGERAPQHLLVDLGQLAHDRAGTIGAERRGHRGQGGEGPVGGLEEHHRAGLGGELGQAAVASAHPPWREALEAEPVGRQPAHHQRRQDRARSGHDVDLQPPCQAGGDEVVAGVGDAGHASVGDQRQPRPGGDPVGEELGAVALVDVVVAGGAGRHAEVGQELAGLAGVLAGDQVGLGQHPGQPGRGILEVADRRPADDELAWRHAPRLSVPGLRR

SEQ ID NO: 350 - protein, 984 aa, synthetic construct
  REGION 1..984: note = Synthetic
PRLVHRTATVRLRSTRRQANRCYGLLRSAGDVWAWLLDTNRQRQRRGESAISNYQARCRELTSAGPFGELSVTGARSVLQRDADAWFQAANRRKAGQKDAGFPRRKRALVPVRCYHGTFKIDGQRVRLPVASGQPALWVRLARALPYPPEQIRAVILLADGGRLWLAVTAAVPVQDHDLDGGRVAGVDLGVIHPDAVVTETAGLLVSGRALRADSYLHLDDQKSRQAKAARRVPRPGQRGSRRWRRHRARVRRAEACHRRRVHQAQHQAAKQVIAFAVHHQVGTLVVGDLKGITNQDAGGCRTSGCGSGAAPTCSKPCATRLSKPGSWCGWWMSVAPPPPVPPAGGGSPSPRAGGSAVPIAPSRGTGIWSVPTTSPRRLAADLRARRCLCSSSTVGPASCRHGVTDAATSTTSGGVGPAWPRATHRAIMRPLGVARHASPTWRMARIKQRCPTGQTLPEGALVDGAAEEQPDADHRERGQGGGQDQDRDPGWDVGHGGLQGGPHALADIGERVEGGHDLEPAELVERGPRVLAGPGEQQRGEDQGEHDVDPVDRHGRAQDEPERRPDQRPEQQDGDEQGHAAGPPRDGAEDQDADREHDRARHQRPHGREHDLLHPDHPHRHGGQQAVLDLLGEAEIDHQREGGALERGEHDGHGHDAGEQHLGVAGLGEAEIGQHPAEHEEQEQRLEHHLGQEHRQLPPGDIQVAAEHRPEHLGPAGRDRLGGGGKLDGRAHRSALPVRWMKTSSRLGVPMETSVSSAFRRLTTAATGATMRGASPATYSRARSSLGAAAPSGGPAPGGGPGGPGGPPIPGGPPAKAAGPPWAAATRSTRSTPSKAPRAASSSSAGVPSRVTATSRVVRPGSPRVRASGRSRASSLPWSMIPTRSARVAASSMSWVVSTMVTPRDLMSATRSQTNRRAAGSRPVVGSSMNSTLGACMSALATMTRWAWPPENMSGLSSARPSSPNSASSASARWVRSSVGTPW

SEQ ID NO: 351 - protein, 528 aa, synthetic construct
  REGION 1..528: note = Synthetic
PRQVLRTAHIALRVTHRQTNRCYGLLRSAGDVWAGLLDTNRQRQQQGERPLTGYQALCRQLTSAEPFGELSVVGARSVLRRYADAWFQAAKRRKAGQQDAGFPRRKRALVPVRFYNGTFTIQGRRVRLPVAKGQSELWVRLARPLPYPPEQVRAVTLLADGGRLWLAVTAAIPVQQHDLDPDRVAGVDLGIIHPYAVVTETAGLLISGRALRAESYLQLEDQKARHAKAAKRAPKRGQCGSRRWKRHRARLRSAETRHSRRVQQAQHEAAKQVVAFAVQHRVGTLVIGDPKGITGHDAGRVQNLRLRRWRRTHLLQALRDKAEQAGMVVRLVDERGTSSTCPACRQRVSKPKGREFHCPHCGFQGHRDLVGARNIAAKAGGGSTSTGLPVLVEHRRAGIVPARRDRRRHLHDQRRRRFCLASGHPDEPACSPWCRSPDTGLQPGPARIKQRCRTGQTLPEGAQMLVRVAVVDGAYMDVNSESLACSAALPGGQSPEMPATGPASAPPRNGGPRPPPGGAGPQGRAPGR

SEQ ID NO: 352 - protein, 629 aa, synthetic construct
  REGION 1..629: note = Synthetic
PQVVHRTARICLRTTPAQANRCYRLLRAAGDVWAWLLDSNRDRRQQGDPAMVGYQTLCRQLTSRGGFGELSVVGARSVLQRYSDAWFEAARRHNRGERAGFPRRKRFLVPIRFYNGTFLLDGDRRVRLPVAKGHPELWVRLARPLPYPPDQVRSVTLLHDAGRLWLAVTAAVPVEQHDPDPDQVAGVDLGIIHPYAVVTQDAGLLVSGRAVRAESYLHLQDQQARQARAAGRAPKPGQRGSRRWRRYRRTQQRAEARHRRRVHRAHHQAAGQVIAFALSHQVGTLVVGDPTGITRRNAGRVQNWRLRQWRRTHLLGALRDKAEQAGIRVHLVEERGTSSTCPACRQRVPKPRGRRFSCPHCRFQGRRDLVGATNIAAKLGGGHPSTASPALVEHRRVGIVPARRDRRRHLHDQRRRSCLASGHPTRILAGMGVARRTHPLSCVWRGSSSVAQPGQTPLEEALDPDEGHRRGQDEREGEVDRPPGAPVVGEAAQGGPAGRPHRRRPQDHGRARGRDGHAPGHRLEARRQERARRGQGEQPSLGVDELEGRGAEQPERPRHHRPPGPVAGGDPGRQVEQVGRADHLQGQVDAGHRQEHHPDPGGHGEDQGAHAHGGPGHMARRPAEPEAAP

SEQ ID NO: 353 - protein, 468 aa, synthetic construct
  REGION 1..468: note = Synthetic
LRVVHRTARVALRVTSGQRRRCFGLLRSAGNVWACVLEINAWRRRRRDAPLTGYQELCRELAASGPGTFAELDSVGARSVLRCFSDAWFAAAKRRKAGDLSARFPRRRRALMPLRWHHGTFTIDGRRVRIPTSRGTPPLWVRLARDLPYPLEQIRSITLLCEGSRLFLDVTAEVPVTVYAPGCEPDPQRVAGVDLGIIHPYAVAGPNGKGLLVSGRAIRAEHRMHLADTKARRRAVSRRAPRPGEKGSRRWRQYRRRARQAEGRHRRRIRQAQHEAARTVISWTVRQRIGVLHVGDPRGVLDLPAGRRHNLRLRQWQIGRLIQVLTDKATLAGITVRLVNERGTSSTCPACQQRVPKPRGRTLSCPHCHFSGHRDLVAAATIATRTPGGGPTTPTAVVLPQVITHRRAGRHLPGAGQSRRDPRRPPMAARGSVGPRRPAPPPDGESLAHPARIHNNHRKPGERSWTPH

SEQ ID NO: 354 - protein, 359 aa, synthetic construct
  REGION 1..359: note = Synthetic
VHRTARVALRVTSGQRRRCFGLLRSAGDVWACVLEVNGWRRRRRDAPLAGYQELCRELSVSGPGTFGELDSTGARSVLRRFSDAWFAAAKRRKDSDVSAGFPRRRRGLMPVRWYHGTFTLDGHRVRVPCAKGAPPLWVRLARELPYPVEQVRSITLLCEGGRLFLDVTAEVPVATYPSGEGPDPARVAGVDLGSSTRTRWPARTDRRCWCRGGRSAPNTACTWPTPRPAAVRSPDGPRSPVRRGHGGGVSTGVGRGGSRAGTGAGCVRPSTRPPTRWCPGRSASGSVCCTWVTRVGCSTWTRGGGTTCGCGSGRSAGSCRSSPTRPSWPASPSTSSTNAAPPRPARPAGGGYRNPAAEP

SEQ ID NO: 355 - protein, 456 aa, synthetic construct
  REGION 1..456: note = Synthetic
PPIVHRTTRVALRTTPGQSRRCFGLLRSGGDVWACVLELSALRRQRGVPALVTYQELCRELSAAGPGTFGELSSTGARSILRRYSDAWMSTAKRRQAGDRSARYPRRKKGLVPSRYYAGTFWIEGRRLRIPTAKGAAPLAVRLTREVPYPAPSIRSVTLLADGPRLCVDVTAEIEVEHYLPGAAPDPDRIAGVDLGIIFPFAVVADEGSLLVSGRALRAESRLQLAEAKARRRAVARRAPGKGQRGSRRWRKYRVRTKVLQGRHRRRLAQARHEAAKTVVDFARQNGIGLLVVGDPRGVLDRDAGVRQNLATRNWRVGQLMGVLEDKARAAGIEVTTVDERATSSTCPRCGNQVRKPRGRNFSCPHCALAAHRDLVGAINIASRSPRGGINVDPAGLAITHRRAGRHLPGRTRRDPRRVALEQRGRLVGLWPAVARPGAVEHDGSGESLARGASVA

SEQ ID NO: 356 - protein, 456 aa, synthetic construct
  REGION 1..456: note = Synthetic
PPIVHRTTRVALRTTPGQSRRCFGLLRSGGDVWACVLELSALRRQRGVPALVTYQELCRELSAAGPGTFGELSSTGARSILRRYSDAWMSTAKRRQAGDRSARYPRRKKGLVPSRYYAGTFWIEGRRLRIPTAKGAAPLAVRLTREVPYPAPSIRSVTLLADGPRLCVDVTAKIEVEHYLPGAAPDPDRIAGVDLGIIFPFAVVADEGSLLVSGRALRAESRLQLAEAKARRRAVARRAPGKGQRGSRRWRKYRVRTKVLQGRHRRRLAQARHEAAKTVVDFARQNGIGLLVVGDPRGVLDRDAGVRQNLATRNWRVGQLMGVLEDKARAAGIEVTTVDERATSSTCPRCGNQVRKPRGRNFSCPHCALAAHRDLVGAINIASRSPQGGINVDPAGLAITHRRAGRHLPGRTRRDPRRVALEQRGRLVGLWPAVARPGAVEHDGSGESLARGASVA

SEQ ID NO: 357 - protein, 278 aa, synthetic construct
  REGION 1..278: note = Synthetic
HGHVPHHRDVAQRERTGVGRRGLEVRVLPSGAGARPGPGPDPGRVAGVGLGIIHPYAVAGPDGAGLLVSGRALRAESRLYLAERKARTRAVAARAPAGAGEARHRHRLAQARHEAARTVVDWALEQGVGTLVVGHPAGVLAHDSGARHNQRVRDWRPGQLGAVLTDKAEALGIAVVIVDERSTSSTCPACERVFIPETITHRRGGRHLPGARASLGESLDRHHGGRGSIDPSPETGPTVTGAALRSLPTSHTRSSPSPRRPSTFVRGAPRSSRCNTNR

SEQ ID NO: 358 - protein, 488 aa, synthetic construct
  REGION 1..488: note = Synthetic
TREAPYRAASVRSVTLLAEGGRLYVDVCAEVPLETYGAGEAPDPKKVAGVDLGIIHLYVLAGANGALVVSGRAMRAESRLHPAESKARERAVARRSPGRAQRGSRRWRKYRARTKVLEARHRRRLDQARYEAAREVVTYAKEHRIGTLVVGGPERFARSRLRSAPEPRRAQLEGGPAHLSSERPGGAGRHRSGPRRRARHLFGSQEGQPPLLRGTATHRPKGARVTGHSTSQCRRGSRRVPGSARVAAARRYDLGDAHLRHRLRGRHARGPQRGRPGQSRGVDPFRLQEHQFEHRDRRAGAGAPLLYRGQAHGPAPGAPREDGEAPGLAEGARRGEDRGGVAQRGASADRDPGRDLERQRPGAQQVHQGSGSEGRELADPGGPAAGVGEKARRPAGRDQRLQGEGFRHSPAVQQLPRLSGQAGPSLTPAESKVAISPSTLAAACRTGRARQAPVPSPSRRSSSSSGTSPRCCNATDAPGSVDRWPATR

SEQ ID NO: 359 - protein, 414 aa, synthetic construct
  REGION 1..414: note = Synthetic
PAKLRKAYKSVVRLSPSDSAKLVFLVSAMIQLWNRALNEAENWLEQNEGKEKKDRKAITAFTFNYWLTGMRDQSIDMPDVGKISLRDFPIDVEREVLRKLAGSYKSFFELRKRKDNRARKPRPKRDVSLKKPFMFLALSWASAFQVHGNVVEVTGFRKEKIRIPIGEYLEERVRDKEIVHVTISLNDDGQLVLSLVTTAPLPPVYSTPNFFRAIDLGAGDIAVTDSDGTEFLIPARRADKHWGRVVRAIEYRLKNPRRENATVVKKDSRRYRGLMTSRRRVFGIQQDQQISFQRKLAHALVQDKVQCIVLGKARTRLGLAQSSGTNQQHYGVQNTGYMSRLPIFIKEKAAERGVRVIELPDPVREGRIDDPSSKFKATRTLLSQALSTNDLPMPQRFLRKGFAFGGTKGEGRAM

SEQ ID NO: 360 - protein, 385 aa, synthetic construct
  REGION 1..385: note = Synthetic
NRWTRKTFGQKVTPRPEDLEKLIRINGILSKLWNMAVEQCNIWLGMPKDSSERRSITPISLNFWLTPTRNNDTDINSVPVVLEREMLRRLAGAFSSYFELKKKGDAKARPPRPKDPEHSFITLTWTQGSFSVDGDTLSASIGGQQKIIFTLGEYIREKLRMLPAKACVAQVTVSKRDGEFWANFVCNIPKAETQTPKHLLAIDMGSGDIVMSCSNGREYSLPTRRPDKKWRKEIRAVETRLELCKKYSRSYKRRMKARRVMHNKSLHQHTDHQRKVANWIMKQGLTVVVGKMHTRLGLAQSSGTADQHWGVQNTGYAFRLLIFIKEKAAEYGLTVLELPDPRRKGDSTDPTSKFNASRELLRQGCTKLNFSFPDSFTKEKPLLVQ

SEQ ID NO: 361 - protein, 397 aa, synthetic construct
  REGION 1..397: note = Synthetic
SETIMKTIWWLISPTQEQENLLLELSEAHRILWNTTNEYAREYRKHYLNCFHKNESLEKNDRIKPIVQEFDLMYQYKNIGKFPELAILNVASAQTTMERVVAMWQSYLGNRKGGDWTACEPGDAYAHQFTVMSWKAPQLYMIDRGIRVPQNSGSELVISIAPHANMIRNYKIKKLTITRCVRDLEKPSQYKISATYELPKPETVSLERFMALDLGAGDIGYYSPEKSGTISCRRPDKYWMPKIADVEKRMTKCTKGSRRFQDLATARKTMFKKMADQQLDFERKTAHAIVHMADCIFIGVTSVRLGLAKTKTKSGKVHRGVQNTGLLARLPDLIRQKAIEFGKVVIDVPDPRLQNDQGTNTLTKHPSFNRDEYLAQKKLSAKIIFERGMAVYNQKAA

SEQ ID NO: 362 - protein, 422 aa, synthetic construct
  REGION 1..422: note = Synthetic
MLALKINITKFIKQEERDRIFKYSKSLAECYNLALTELKTNNDFNAIHPLTKKFQNEHKEIYSKHAQNCGRDAISAVKSFFKLRKTNDKAKYPKHNRKYSTITLDANKQKVTTKDGSTHINFCGGFKFIEDKVIKFTYPQMLLDLSSCKYFNSQLINKDSIKQIIIKVDEGKIYACFVYSEPKKEDKQLNNEFIAIDLGISAIASIYSSKGECFKYQTKRMKSLEKNKDKIKSKLDRKKKYSKKYLKIQQTLKKKQKKITNKRNDYLHKASKHIINYCLKEKIDNIIIGDIETKKLVTKKEEFKELNYKQRKIAHSRNKSTQNEGLLSRFKSFINYKALNKNINVLMVNEAYTSQTNCLTGIRNLSSDLSIRKVNLGHDFIVDRDLNSAVNIAKKYGALWSVHSFNKYSLLNVKEINSNELE

SEQ ID NO: 363 - protein, 414 aa, synthetic construct
  REGION 1..414: note = Synthetic
MLSRKIRIDNFISDKEKEEIYQYSKSLSAIYNECLDLLKENLNFKDLSKITKGGSKATGLHSKHIQNTSREVINAVKSYLVKKKNDKSARFPKLHREYSPIIMVANLSSKTEEIVNSRTGEAILEKKYYPGGGFKLEGKKINFTSIGFELDLSKCPYYDIELINYETLKQIVIKIDENKRIDCIFVFSEKKQEKAPNQNFLSIDLGISSIASCYSNKIDCLKIQTKRFKGLERTINELKSKRDKKKKDSRAYKKLNKTIRRKQAKLTNKRKDYLHKASKTVVDLCILNGIDNIICGDIKTKKLKKDYKTSLNKSTQNEGLLSRFKGFLKYKAENKGLNFLLVNEAYTSQTNCLTGKRELDSNLSIREVELSPGFKVDRDINSAVNIAKICGDLWLSHIFEKNRLLKIQKMNITL

SEQ ID NO: 364 - protein, 269 aa, synthetic construct
  REGION 1..269: note = Synthetic
MFIGYKYFKSFVIDGNCGIGEFKLENGLLTLLNPGRVGKRSEKDLVSFNLGQYGQDITRKTVARLIFSRNRNNEYYVDITYNEEAPEQKLDNCNYMSIDIGTSSIATCYSNKINNLQIDNTRFFKLEKSIDAITSKRDKKKKYSKRWRRLNEIKKAKQVKVANKNKDFQHKVSRKIIDLCKANEINTLVVGDIKTKKLVTKYRHVRNTNNQNRGTLSRFKGFLKYKAINEGIIHVHVNEAYTSQTNCLTGQRNLSSELDVREVELLPGE

SEQ ID NO: 365 - protein, 437 aa, synthetic construct
  REGION 1..437: note = Synthetic
MKSIKVKLYINHYQSIVLNTLSNEHRLLYNHLLSFVKIDFNFKQLNEQYKFFKSSNNLTIQSKPAQNTCRRLINSIKSFYKLHKKDKAYKFPYKFKSWKYFTTMEFDWNNGGGGFSLNDNVLEIFLEHNGKKFHKNLVIELPEYCNIITKDNVKTLQILKEDNNYFAIFTYKESKKEIIIKHEKIIAIDPGLSSILTIYNPVDNEAIEIKNNQFHKKISKQIEIIQSKRDKKKRGSIQHKKFAKLYKRVFKKLSNKNKDFQHKLSRQIVNLCVNKDVTKVIYGDIKTKNLVINDMNCKESKKENIEKNSRLKAKEHGLNKSTQNQGSLSRFKTFVEYKIKNEGIEFVKQNESFTTQINCLTNKLFDNKIKLSNRLVTLTKDLCISRDVNAAINIYVKNLGKPIVKGEWLAHIKMLKSYEMLLDIFSNELILNKVKIA

SEQ ID NO: 366 - protein, 438 aa, synthetic construct
  REGION 1..438: note = Synthetic
MLSLKVKIKLDYNQQVIVETMSNEHRLLYNYLLQSIKESSKTFKELNQIYKNYRNDNCLTINSKSAQNTCISFINNIKSFYALHKKDKSVQFPYKFKSYKYFKSFMFDYNKGDGGFILKNNQLMINLFGNKKTRESKDLIIDLPKYVTNKINDNNIKTLTFTKEDNGDYYLVFIYGESNSNKIINKDFLSIDLGYSQLVTCYSNKIDNFSVENLKLKKLQKRIEYLQSYKDSKKKHSNSYNKINKSFKRVKKKQVNKLKDFQHKLSTKIISICKENQIGNLIVGDIQVKKVIFNKINDLKKQIKQAKLDNDVFKEACLTLALQTEYKKQKINGLSKSTTLGRFKTFLEYKSIKEGMEFHSINEAFTSQQNCITDEIMYSSNLSNRSVEVKPGVVIDRDLNSAINIAKKCKVTWLDHQMDFNLSKMYLNVHANELVKYE

SEQ ID NO: 367 - protein, 373 aa, synthetic construct
  REGION 1..373: note = Synthetic
VKYIEQQNHLPALKEKYPQYNIVYSKVLQSVLKKLDANYKSFFSFWKNGAKSARPPKFRSGKYFMTLVYNQSGFKINSEKLSFFHKANEIPLSFEVGNACDLLTIKQIEIYNDDPYKGRGNFFVSITYDENPISPITEYVDNDLYQAIDLGITKIVTAVNTQGKFFEVKTPRSDQYWNTKIDTIKSRKDHCKKGSNRWNRLHKTYRKMEAKKSNQIKDFQHKFSKTMIENTRANKIIVGDLNVKSMAQSKKVTGKRKRSQSRSTRNQGYLSRIIEFLTYKAELTGKRVIRIDEAYTSKECCVCGKRHNIPLWERTMKCDCGNVIDRDRNSAINIMKQFLSQNALWTGYQKFSDNLRQTGLQMDTCITANIQVT

SEQ ID NO: 368 - protein, 424 aa, synthetic construct
  REGION 1..424: note = Synthetic
VHITAKIRIQVIPEQEDVLWHLSEKCRLVYNFALAERNRNYQENKDRPGKQYIGYVQQANALPKLKEKYPEYKWVYSKVLQTTLKSLDDDFRSFFALRQNGDKGANPPGFKGKDHFCTLRYNQSGFKIERDQIWFSHFYNTVPLIFALPAGSQFINVKQVDLFYDDIKSAYYVSIVHEVQPAQEYRDNGLYQAFDLGVTQHVGVNSHGKFIGFSVARPDKYWKTPIAELQARRDHCKKKSRKWQKLNRLKRKCERKQGNQIKDFQHKLSKKIVENTRANTILVGDLSVKQMPRSRQATPGLNRATQNTGHLSRFIRFLTYKATLAGKRVIKIDEQNTTKACCVCGALHDMPLWKRVIECECGNTMDRDRNSAVNIMVRFLSQNALRTGYRQFADNLRQTGLEIPVHSQEAPCVGGGSSRIWVVP

SEQ ID NO: 369 - protein, 444 aa, synthetic construct
  REGION 1..444: note = Synthetic
MQLTLPIRINPSLEQETVLWNLSEKCRLCYNFALMERRDAYKNKIKISYVKQQNDLPTIKQTYPEYAWVYSKVLQGTLKCLDNDYKSFFNLKKNGDKKSKPPGFKGKDYFTTMLYNQSGFEISDSNGHVVIRKSMDTRINRPVLDYFDQDKLYIDLSHKHPSKIPLKFELPIEVLNEGIFKQAVSIDQINVYQKETEFYISITYSVASTQFSNNDAYLAIDIGTIKQSMVDTDGNFTELINRRPDKYWEPKIHQIQSRRNHCLKKSRKWKLLNKNLKKMKRRSSDQLKDNQHKITKRIIENNDANVIIIGKLDVKQMASSKPDDKKYDKSTHRGTHNSGHMGRFAQFLTYKAENAGKRIIRIDESYTSKMCCVCGSLKDMSLNDRTYECGVCGNVLDRDCNSSVNILLRYFKHNALWTGYQQTVDNLRLTGLQIGIIPNRMITK

SEQ ID NO: 370 - protein, 449 aa, synthetic construct
  REGION 1..449: note = Synthetic
KKPLQLTNKVKITPTEEQKQVLWVLSENCRLIHYFANKERKEWWSKNQHLPKKKRDKENKPSYNKQSKQLPKLKEQYPRYKQNYSKTLQDTLRQLEADYKSFHALRKNGDKNARPPGFKGKHYFTTMHYNQKGFKIAGNKITFTHFYPAKKAEKVDLTFEMQGKLTFENKKVKQVTIYQVHKTKEFYLSIIYEENTPEYFDNGIYQTIDLGLMNIVAAVNSHEGKTITVKNKRVEKYWQPKIEEIQSKRDHCKKYSNRWHRYNDKMWKMIRKQANQRKDFQHKVSKKIVENTKANTIIIGDLNVKAMSESKKNDKKNDKSRHRNMQSSGSIGRFAGFLTYKAEKAGKKVIRISERGTTKRCCYCMQKKNRKLSERTINCDCGLVINRDVSGTVNIMQRLLALLALSLKRLVVRQRLLKEFREKFFATHSQKSNESSSTLELGGLATKSN

SEQ ID NO: 371 - protein, 417 aa, synthetic construct
  REGION 1..417: note = Synthetic
ELIMLLTFKIQLRLNDEQQSIIDAISNDGRLLYNYFLGKLKEQYEKDKTFISYYIQQKELKDYKSDYLTFDIKKDILRTLHNNYSSFFKLVKQNKDLNPKPPKFRGKDYFFTLSFTQDFIIKENILRLSYSNYRKLDVKLDFIKPIKNLICLRNKTKESEIKQLKIYKKNNHHFASITYEKQENILKNIDKTKLLSIDLGKKNLLSIYDVENNKGIVYSSKYLSKNQKFLDKRLDELKSLKNSKKKYSRKFKQINKKLKKIYNKKKTQTNLTLQKVSKDLSNQNKTILIGELTNLKKNIKSNYKYLNRQMQNNWNLQTFIHLLEYKNKLKGNQVIKINEAWTSKTCCKCGNINHDLDLNDRQYICDCGNDINRDINGAINIYKHFMGDYNPPFETLVVSERFDWCHINQMNRNYKFY

SEQ ID NO: 372 - protein, 425 aa, synthetic construct
  REGION 1..425: note = Synthetic
LAKKIKIEVSTEGAEALEWMQGKCRGLYNWWVMRLRSGEVRWNLKAAKLSLRESKAYDPDLRFVYGKLLAEVYFRLDKAMQAFFKRVAEGNKKPGFPRVKPRHQFFTLCYPAMYLELQGKNLILPTGGGGRAWGPKRYPNIVAHLTEEPPVGFREVAVSRDGRGNYYCSFTYEEAEQHQATPSEQRASAKKKRQKRKPRRPMREEGVVAFDLGIKTLATGYSDQGRFYHIGGFKGYRWYNKQLDKIRSKRDKCKKKSRRYIHLSQVYKRVSEQKRNKQQDCLHKAAHLIADRLAERAVVIGDLSQQQMVQQKQEQETPQQKRKREIRNRMVYNDWGLYRFVQILTYKCLLAGKTLHIISERNTTKQCHRCAHLQPMPLWKRTYRCGNCGLVMGRDDNSAINLSQRFLARLGPHTDDSVRCTECSP

SEQ ID NO: 373 - protein, 269 aa, synthetic construct
  REGION 1..269: note = Synthetic
MQGGNYYGSFLYEAPESNHQTAGIVAFDLGIKTLATGYTDKGRVYHIHGFKGGRWYNRQLDKIRSKRDKCKKKSRRYLRLSKVYQRVAERKRRKQQDCLHKASHLIADQLAERAVVIGDLSQRQMVMKKQEEETPKEKRKRQIRNRMVYNDWGLYRFVQMLIYKCLRAGKALHTISERETSKTCSRCGWKQAMPLWKRTYRCPNCGLVKDRDENSAINIFQRFVAGPPPHTSLGECGVLHEEGNSSEVMEASCHLQVQQLELWADGASV

SEQ ID NO: 374 - protein, 401 aa, synthetic construct
  REGION 1..401: note = Synthetic
LLTKKNKIKIKKNDIESLKYQSNLCRLLYNAALEQRIMAWEMQKKSINVYEQKRELPQLKEEMPEYKKVYNKYLSETLFRLDEAFKGFYQRCKKNDEAKKGFPRFRGKHYFFTLTCPAMYVKKIDDKTLQLPQKIIIKTYEAIPDNFKEIHIVKQKNDWYITFAVNIEEQSQIKPKEVLGIDLGLKKLVTAINTSNKKIEYNHIKPGRKELNRLDNLRSKRDKCIKFSRRWKYLTKRLKDELSEWRNRCIDWLHKVSYQVIKKTEGIIVIGKLLQNTLLKDNRHLNRYIQNEWRLGKFKEFLKYKCKKFGRQLEEINEAYTTQDCFQCGNREKKSLSQRTHKCECGFTYDRDINSALNILKRFLLGLSHQERNKLNLSDFWLDVLGSPRNLNIDMNTFVYI

SEQ ID NO: 375 - protein, 373 aa, synthetic construct
  REGION 1..373: note = Synthetic
NLVLKTKAKISNKNKLLLKQQMEQCRILWNLALEQKINIYRSSKETISVYDQKKQLVDLKKEFPEFAKVYNKYLSAILFNLDKAFINFFRRLKNKEKPGFPRFKGRNKLCSLEAPAMYCKKIDDYHIQIPQKIIIKTKDKIPDNLRTIYITYDVKENIYLSIIYDQPIIESNTGTKIQAFDLGIKNLAIGYDGEGFIRFNAFKQTRYFDKIVDKLRSRRDKCKKYSRKWKLLTKTIRRIYQTVSNRRENYYHHVSKDITSQADVRAIVVGDLSIKQMISKNRRLNREVHNRWSLNSLIQKLRYKSILNSKLFYEINESYTSKTCSRCGSIQEMPLHRRQYRCPECGLSLDRDENSAINIWKRSLAVLQPVLIN

SEQ ID NO: 376 - protein, 390 aa, synthetic construct
  REGION 1..390: note = Synthetic
EDSVVLCKKIQIYPTKEQIADIERDSFLCKILYNTYLTQRKEYYICYNTTMKMTEQRSQIPLLREQNTDYAKVYAKHLHAVCMDLDEDYKGCIKKRSKGEKTKLPRYKNKNYFYPIKTPKQYVKIKQDKIKLGFYELKVDVNEIPENYGEVWISKVRNKYIISITYEANKKENSNSTTLAIDLGISKLVTGINQNGEVIEIVNPRYDKYWNKKTDKVRSMRDTKKKGSKRYKKLTNTLNRLYENRRKQQEHFIHTITKYLVLNNKELILGDLSQEQMVKKSNLTKLNRSIKENWGLGKFKTFLTYKAKLQDVNVVYINEAYTSKTCSNCGNKQDMGLSKRTYTCECGMTLDRDINSSINIFNRFKEDTELNYKNINQVTILHFHYGKLSA

SEQ ID NO: 377 - protein, 470 aa, synthetic construct
  REGION 1..470: note = Synthetic
FSYLTLKLPIAVDITNGNKLWSASNAVCFTHNQLTEHQNQVGWSDNYYDIKKLLPEIKGNFPWLKESSSQVLQEVAKSHSGATKSWKTKATKTNKVTGKPTKDSKANPPGFKSRKYFQTHKYPQRGISFEIEGKVLKLAFGSRPADWIVTELPHEVAGASIKAVAITHDDKTGFSVCLETIFELPHRTDNWHVLVVDPGCKTALTCLRSDGTIWEYDIASLRSLNMNIYQKIDDLMSRRDILPCALKLAEYWKAKKKANSFAGPMPAGHIHPIKPKLSREYRRLAAKITKCFASIRNRSKQHLHTVAKKILKDHPMVADIFIGDWAKQETVAETPFKAKNEAINRVVQNNNPVNRLIEYLRYKAAAYKAQQVDKFDERGTTKTCSKCDYVGKKLDPSQRTFTCRKCGFTVPRDINATLNQMKYVAYGMWHALKAIPAFSSVRTSLSGLSCVNFKRQRSLVSLSTGMHGVY

SEQ ID NO: 378 - protein, 426 aa, synthetic construct
  REGION 1..426: note = Synthetic
ILTEKQYVEIDAQISSTLWFNSRCSVRIWNRLVEHRETAKKQNEPSGYITQKKQLPIWKKEDERLKQPSSQQLQEVVKEFHGAWKSFFEKRNHGDTDCRPPSFRSSRNFYSMHYPQRYNSFEIEGGTLKLAFGKNRKEWLTITLRENDYSNVKTVRLCFDDVLKQFCVCLHREEVEAKPKAEGLRLYFDPGCKTTLTGIGSDGKIYEYDINPLRKVNMSSYKLIDELISRRDKKQKKSWQWRRLNKRIARLWRKVKYRTKAYLHTLANRIFASHPNLSKILVGDWNKQETLADAGYVFVNKRINRAVQNNNPVNMLVTILSYKGKLRHGVSVEKFDERGSTRTCSQCNYIHEEGVSPAVRLFTCPECGFTYPRDWQSGLNFLRQFESAVWSGLEGHYPSRSVRKVLAPFSLKAQRTICTASFALAS

SEQ ID NO: 379 - protein, 431 aa, synthetic construct
  REGION 1..431: note = Synthetic
VSAFYLSDKIRISPNKTAIDKLWAVSYACKDVWNWLNGERYDRDKKTNYYQQKKQLPLLKRQHPALKVPSSQVLQEVVKSLNASWQMYFTRHKKGDTDVKPPRFKSYKYFFTQKYPQQGVSFEIDCNILRLAYGRNKSSWIEIKLPQREYDFQAVKNVVVSYDRRDKKWYVSLNRRVQLPEKRVNAHTIYFDPGCKMTLTGIKTDYSVVEYDINPLRDLNLKHYQLVDHLKSLRDTKQKHSRRWRRLNKKISGLYRKIRTQTKHYLHKLVNQILQDHPDTNFKIGNWNKRQTLAATGIVIVDNRINRQVQNNNPVKKLIGYLRYKAIMNAQQVEEFDERGTTRTCSGCGNQQQMPPNKRVYLCPKCGFKVERDINSVLNFLKNDNYAMWHGLGEVLSIASYRFNPVTGANRRIENRSVILNYQDARGLLTP

SEQ ID NO: 380 - protein, 433 aa, synthetic construct
  REGION 1..433: note = Synthetic
MILTKKFQVFPDKESKDKLWDGSDCCVDIWNCANEQRQMRSGFGKVNLYSQKKELALLKKEFEHFKRPSSQVLQNVLFSLDRSYKQFFTKLKQGDKRVKRPKFKSKKYFFSQEYSQPKTSFTLDKESKILSLAYGKSRNDWIHVSFLDSLPFPSEQVKTCIIHFDSMEKKWYASVTYVFEEVRYQKNNVSLYFDPGSKTTLTGITSDGNFVEYDIHPLRTLNMSTYKHLDELISKRDNLKSKKSKRAVSAYRRLNRRIKKGFRKINTRTKMYLHRLANDMLDNHPDVQQFYIGDWAKQTTLADTKNTFANKTINRAVQNNLPLGKLIDYLTYKAKMRGKVVEKFDERGTTRTCTKCNKQHPKGVSTTARTFQCIDKHCNFRFSRDHHSCLNFIKHFEPALWRCLVEQDNLPTRSEKRTFAPFSLKSQIYSYQL

SEQ ID NO: 381 - protein, 410 aa, synthetic construct
  REGION 1..410: note = Synthetic
KHYLTAKIKLHPNIEQTEALWIISDSARRLYNLALEQRKSVYSHRKHDVSMFEQKRELTYLREEYFPELHSQTAQEIIRDLDEAYKSYFKHYKTDKSTRPPRFRGYKYFYTLTYPQASFHLEDNAIILHNPKDWLRIEFAEGYRNIERVKKIKQAEICQHEGEYYACISCEVIPERQKTTGKEIAFDPGSITLLTGYDGEQIVEVESKALKKTAKYYDKAMDKIRSKIDLSKPGSKRHRRLIQAKRRTLKKRARRMKQINHCISKELINMGYDAYYVGDWSKKETLADTGIPVVDKKINRVVQNELPVGILVDYLRYKANLKSKQVEKVNEARSTNTCSCCGHVGKKLPITIRTFRCEKCGLKLNRDENAAINLYRWYAAPLTGPAPIKSRMSIKFVFGRYNKCLVQTSA

SEQ ID NO: 382 - protein, 265 aa, synthetic construct
  REGION 1..265: note = Synthetic
FRDIPRAKAIKQIEVSEETGSFYANVTCEVISEQAIKTGKTIAFDPGVKTILAGFDGEQFISVDGKAIKKTQKHHAHALDRLQSRIDRSKNGSKRHKRLINAKKKVLRKRSARVKQISHCISKTLASMEYNAYLIGDWSKKDSLADTKSRKGDRIINRAVQNQLPLVKLIGYLSYKTALKSKQVRKVNEERSSQTCSSCNHIQEIRLTQRIFRCEHCGAKINRDDNAAINLYRWNAGPVTGPFDSLERIRLRFVFGRFNACLARV

SEQ ID NO: 383 - protein, 444 aa, synthetic construct
  REGION 1..444: note = Synthetic
VNTMLMTEKVLLDPTPEQREWLWEMSRTATRLYNLALEQRRWYWLRYHHTRPGITYQYQNAQLVELKEAFPEFKVLYSLVAQEVLRLAQKDFNSFFGRLKNQKKNGNEITARPPRFKSSKYFFTLCYVQSGFAVKDGKLILSGGMEPCPDKKGRVRYRQRKEAIQIIGYRKLPDKVHSLTVTYDRKTGNFYANLVYEVEPLKADTVQPLKIAAFDPGVKTFLTGADNCGRIIIFDSLVKRATGYFDRQIDKVKSIRDKCKKGSRRWMYLNEVLDDLYRRRSAQIDNELHATAKLLAGGEWDIVGVGNPDKQGMVSDDPDKGRGNQTINRAVQNNWPLKKQNKFLDYKLEYQGKLFLPLDEKYSTQECSNCGHRMKLDPSVRVYRCPKCGMVMGRDENSSINLLNRVIAGTAQRRVNYKDFRVRIIFHRTLCGKWTHREELLKPA

SEQ ID NO: 384 - protein, 300 aa, synthetic construct
  REGION 1..300: note = Synthetic
VVLSGGQGRRERIAIAGARHIPAEIHSLTLSHDRKSDAFYANVTYWAEVRSEQEERPLQVVAFDPGRKVFPTGADDSGLLVEVHSRTNSINAYFNKQIGRVKSLRDRCRRGSRRWKHLNKVLDELYRRRRAQADQELHAISKLLAEGPWDIIVVGKPDKQGMVSKDPAKGKGNAKINRAVQNDWPLVKLLGRLSYKCHLRDRYVKSADERYSTQRCSRCGHRQKLGPSVRVYCCPKCGLIVGRDENSAVNLLNKILAELARPPVRPEGFTVRAVYRRAPWGRWYTETSRVHNNMALASGA

SEQ ID NO: 385 - protein, 476 aa, synthetic construct
  REGION 1..476: note = Synthetic
IVSLTYSRKIKVNFVKEAELILDGQSKICNWLYNQLLDACQKDYRENNHALKLLKNRNLRNYGVSLKEKHPFLNTVFSSALKEPSTRLVNAYKSFFEGRTDYPQFRSWKKKWFSLVFDEPNKGWEILNEGKTISISLGTIPGMKIEKGKRNPSVTGTLKERIELKKGELIKTFTLCKQQGNQFYAIFTIERCSDQELEFKKVMSDYRKAFNLAKKEGKEKPIKPKLPEKKVNIPMNFKWIALDPNHKNFFVGVDDEGNSIEFKKLTMMTYWDKKIDELKSLRDACEKNYRKRKTKHGNTYKVHSPRWNRFNHALDKAYHKRREQIKTALYTISHELYRRYDLVIIGDYTPTNGTAPFNHMKRRMLNQEKIGEFRHIAEWVAMKLEKYYLLANEHSTTKECCVCGHNEKKDPSIRSFVCIQCGTEFMRDTNSSVNIGRKMGFSLNIQKYKHKLKGFTHIGEARYGKPVLWIENKDNL

SEQ ID NO: 386 - protein, 330 aa, synthetic construct
  REGION 1..330: note = Synthetic
VTLSGPSLRKPDAHSSIHEAALNEAVELRDLFQKCLEDGEKEKAFQVIEVAIEHWESRTLKHAEAEEEGLYKDIVDENPDMISTVIQLTRDHDLMRRLDPNHKNFFVGVDDQGNSIEFKKLQMIKYWDKKIDEIKSLRDVCEKKYRNRKTKHGNSYTVHSPRWNRLNHALNKAYHKRREQIKTALYTTAHELYRRFDLVIVGDYTPTNGTAPFDQMKRSMLNQEKMGEFRTIVEWVAAKLGKYYLLANERNTTKDCCVCGHQEKKDPSIRRFDCMICGTEMMRDSNASVNIGKKVGFSLDVQKYKHKLKNFTHKGKVVYGQSIYWIENKI

SEQ ID NO: 387 - protein, 490 aa, synthetic construct
  REGION 1..490: note = Synthetic
MIYNKKIKIVFNKSDIDILDNQSRILNWLYNKLLNDCIDDYQNNNNKKKLLTGYNLRNYMVTLKGEYPFLKKVYGHVLQEAPNRLKKAYEKSFNEKAGFPHFRSFSKKWFSLVYDEPKGWSINNNVLEFSLGILENNYASQQMAKKPKNTHIKGILCENVFLKEGEKFKQLHILKRKNTFYAMFTIETPPTKEDLLYKDLLNSYKEELSKYKILKANYKNKSIEAFNDGDFETSKNLLSKSKKLIKPEKPSIPKPDIPNNIKWISLDPNHKNFFVGIDYLGKTFEFENLKLIKYWDKVINTLKSKRDKCIKKYKKKTTKNNNSYWIHSPRWNKLNKALDNAYQKRNEQLKKALFVIASFLYKNYDLVIIGDYTPSKETAKFNNMHRSMLNQTVIGKLRKTLEWVALKSGKYYLCIDETDTTKTCCICGNKEHKDLSIREFTCQKCNTFIKRDINSAINIAKKANKLYTPSLENINKINNYKKVTYKTDKI

SEQ ID NO: 388 - protein, 287 aa, synthetic construct
  REGION 1..287: note = Synthetic
VLGELKEKLPLREDEKIKTFRLCKQQGNRFYAIFCIERPDAQRKDVKNWIAIDPNHKNLLMAVDNKGITYEFEKLSQIRYWDKIIDEIKSKRDLCLKKAKKVDIENGSTYYIPSRRWQRLNKALDNAYNCRREQIKSACFSIANWLSKNYDYAAFGDYTPSKKTAVEDTMHRSMLNQDVTGTLRKIVNWVMQRSGKTFSLVDEKDTTAKCCICGNKEKKAPNVREFTCIKCNSTLNRDINSGINIAKKDKLLSGSDYAGWNLFKPTYTAKWDFAKGKLHLQAAQARN

SEQ ID NO: 389 - protein, 436 aa, synthetic construct
  REGION 1..436: note = Synthetic
MIFNRKIEVIFTKEDELILDGQSKICNWLYNYLLEMTIKDYKENNNDKKLLTGRNLRNQVPILKQEFIFLNTVHSSPLKNTAIRLKETYKKFFNNETGYPKFKSWKKHWFSLYYDEPNKGFKLIENKNLQISLGINKENKRIKVIGKLKENLNLRNTDKIKNFRLCKQQGNKFYAIFCIERKDIDKKETNKWIAIDQNHKNFFVAIDNTGVSYEFEKLPQTKYWDKVIDEIKSKRDLCSRKSKLIETETGRSYYLPSKRWTKLNNALDNAYHKRREQIKSSCYSIANWIAKNYDYVAIGDYTPTLNTATYDNMHRSMLNQEIIGEFRNILKWVMERSGKHYSKVDEKDTTKNCCICGNKEKKDPQIREFTCQKCKTKLSRDINSSVNIAKKDKLLSGSDYVDWDLYNSTYTAKWNFKKSKILFTGHTLEKSNIWMN

SEQ ID NO: 390 - protein, 437 aa, synthetic construct
  REGION 1..437: note = Synthetic
QDTIIYCVKTEIMFSDEVSRILNGQSKICNWLYNRLYEMVEYDYKNNDGAAGLTRKFTLRDQVPVLKRKYPFLKTVYSSVSKNVALRLAGAYKAFFEGKCDHPHFRSQKKKWFSLEYEEKAGWVVDGRDLTLSLGKDENNKQIRVQGILKSKINVDNAKSFRLVKERDRFYGVFTIVEKKREVKESEKWISIDPNHKNLFISIDRNGESIEFDNLAEIKYWDAVCDNLRSRRDLCKRKSVFVSTDGRRGYWKPSKRWVKYNEAYKRAMLTRREQIKLGMFTIANYLCRHYDVIMIGDYVPNSSLSTSPNMSRGMLNQSVIGKLRSTIKWVCEKSGKKFIKTDEKFTTMKCSNCGHMEKKLPDIRVFTCKSCGKTFHRDINSAINIAKNNDYLPCTGYVEEPTYTAHWSHKDSRVEKLNKNRGRFLSNCIGVNKLVYV

SEQ ID NO: 391 - protein, 430 aa, synthetic construct
  REGION 1..430: note = Synthetic
MIINQKIEIKFDKESSLILDSQSRMCSKLYNILLENCKKEYEETGQNKLLTGRNLRDLVVDIKQEHAYLYSVHSSPLKNTAFRLKSAFEKYFKSLKDKIYDFGYPKFHSNKKKWFSLLYDEPNKGIRIENKHIRISLGYKLDEEGKKIRLYVNGILDEKIKVGNVKTYRITKELNKYYLIVTIEVSYKTKERKENKIISIDPNHTNFFVGIDNEGKTIELGKLYLIKYFDKQIDKVKSKRDKCLKKSKTVTNENGTSYTVASKRYQRLDKALTKLYLKRKNQLKTALFTIAHKLCDEYTHIVIGDYVPTPDLAKYHTMARAMLNQSPIGQFRSILQHVAAKRGCKFEIVDEAYTTMTCSVCGEVCHHEPNEREFICPCCNTKLYRDINSAINIGVKAKVLSSSDYKGMDLSKPLYTANYNLRKQRVSGWN

SEQ ID NO: 392 - protein, 430 aa, synthetic construct
  REGION 1..430: note = Synthetic
LLIHQKIKLNLNPIEKEILDNQLKLCIKLSNLILESFYNHEREDFMFGHIVSVTFLKKVQHKILNEHPYFKIIHIDTLDRIIYKLKKSIETSLKRTNSLPKYKQSRKNSFLLYYLGSTLSSNIINKSIEVPLGFVLSNNTPMQLKINCKLSSRIHKRENSIISNYEIVKKYNHYFLLVCINKRNIKSREKTGKAISIDPNHKNFFVGVDSEGKSIEFQNLYQLKYFDKRIDEVRSKRDRCSKKSKSYLTLSGTEHLIPSKRYERMNNILLELYHKRNSQITHALYSIANYLVQNYDQIAIGNYTPTSRNIKYREMRRKMINQTIISRLRDTVKYVCQRDGKKYILVNEMFTTAKCFNCGNLVKKDPEIRIFTCDKCKRVINRDINSAINIGIKANILSRQDYVDLDLSLPTYALSFNLQKQKIDFLKLKG

SEQ ID NO: 393 - protein, 451 aa, synthetic construct
  REGION 1..451: note = Synthetic
MILTFNQKIELILTESEKKIIDSQSRTLNYLYNMLLDKVEIEYKENNDSTLLKGYNLRNLIPKIKEERPYLYTIHSSPLKNVALKLKQSYQMFFKGINNHPHYLSFKRKFFSLYYDEPNKGIKIEDNKVRISLGKDVNNNRLYINARIKEDILPYKIKNFRITKDNSKYYLIICLQKEQVNKEINRNKFIAIDPNHKNMFVGVDYLGNTIQLNNFSSIKFLDKEIDKLKSKRDKCKKQSKKIVTINNHFYYKTSKKYHRYNNALERVYQRRREQIKCFCYTIANMLTDNYDVIAIGNYVPSKTKVRQINKVIINESIIGKFRKVLKWVCDKKGKELIIVDEYHTTKECCNCKHEENKDPTIREFTCPKCGIKIERDKNSAINIAEKAKIILSGSDYLMKENNFIKYTISYNYRNNKITIDKINDYYENICESIINMNKLNPSLFDEMYRFV

SEQ ID NO: 394 - protein, 467 aa, synthetic construct
  REGION 1..467: note = Synthetic
MIFNRKIKLETSKEIESVLDGQSKMCNWLYNQLFEAVEEDYKNGKKRKFLNGRNLRNEVPKIKEKHPFLYKVHSSPLKNAALRLKEAYDRFFDPELDNQKPTYRSWKRKWFSLFYDEPNKGFKLLGENRLRITLGKLTEEEHRKAKETDKKAKRQIEIVIGLKEAFQLDEDEKVKTLRITKDLNGYYAVFTVEKITEAVKVKENSFIVFDPNHKNLAVGMDHEGKSYELKALSSTLRYWDKRIDQLKSKRDKCSIYSKLVVTSTSSYWKPSKRWSYLNRALERAHMTRREQIKQVLYSYAHYFSKRYDHILIGDYVPTPDVAKYGSMKRAMLNQTPIGQFRTILEWVQEKNNKHYTKVDEYNTTKECCACGYMENKEPDVRVFTCPKCKTKMYRDINSAVNIGKKARKLLPRLGYVGVENPTYTVEWNWKRQAIVRGKFRLLARGNESLGENKENTSVEEEFLRAII

SEQ ID NO: 395 - protein, 463 aa, synthetic construct
  REGION 1..463: note = Synthetic
ALKIRLEVDEHTAAVLDGQSRIANWLYNHLLEEANALRQRYRETQDPDAARVLYTERGLRDRIPALKQEFPFLRAVHSSVLKNAALRLSRAIREYQKGRRGERAGEVHWPRFRSWKRKWFSLLYDEPWKGYALRGRVLELSLGQSLDPDVGQRRQVHVAVRLAEPLPDWFRHEIVRQLRITKEGRVFYAVFTVERELPATRAVGRIIAIDPNHKNLGYGVDTDGVATEIANPWFLKALDRRIDEVKSLRDRCRRKSVRMVRPDGSVSWRPSRRWQKLNAVLDELWRVRREQTKVYLRTVANRLYREYDAVFVGDYTPHGGGISTRMRRAMNNQSLIGRFKETLKWTAARSGKVYGEWEERGTTRTCSACGSMAPGGIPPEEREWTCPSCGRRHIRDENAALNGLARVLEKLEVPCSGRLGGPVAVRTRRAWRFDGLGIREMPGTAGGRVQRHAASRQEIKCGA

SEQ ID NO: 396 - protein, 303 aa, synthetic construct
  REGION 1..303: note = Synthetic
GPPGWPNRCPMGLIRARSASFGEGRWFYAVFTVKRSVPSRRPVGRVIAIDPNHKNLGYGVGTDGVATEILNPWFLKILDRRIDEVKSLRDRCPRKSVRVVRKDGSEAWLPSRRWRKLNEQLEELWRVRREQTKVYLRTVANRLYREYDGVFVGDYAPHGGGISRGMRRAMNHQSLIGRFKETLAWVAARSGKVYGEWDEDGSTRTCHACHYNVPGGIPPEVREWTCPECGTYHIRDENSSINGLEQVLKNLEVPGSGRLGDKIVVRTRRAWRFDGLGIAEVPGAVGGRVRDHAAGRQEIKCGA

SEQ ID NO: 397 - protein, 478 aa, synthetic construct
  REGION 1..478: note = Synthetic
QAKVVGLKIALDLDEKAKAILDGQSKIASWLWNALLETSNTTLSRVIAANGSGTPADLADIYLLYGEHNLREHMVGMKEDHPWLKCLYSSVTKNVALRLSRAIRDTRNGVRAKKLGWPNFNQWGWEWFSLEYDEPHKGYSFSPGLITLSLGRDKDKKRLLVQLPLHEPLPAFANNSSIRALRIVKEYSIYYAVLTVSRQIVTQKPLPKAPKIIAFDPGHENPLTGFDSDGGVIEIKRPQYLIRLDQRIVEVQGKRDHCRKKSVKLTTHESGKDYWLPSRRWRFYDKILQKLRLQRREQTKRWNYEVANKIYSEYDLASMGDYAPHGGGRSKGERRSMNNRSLVGGLKKTLTWVAERSGKQFVVWNERNSTRTCHACDYKLPYSIDPKFRAWICPQCGARNHRDANAAQNGLDRTKKLVQLPCSGHQEISSWRTWRLTEAGVTEVASTPESVFESLKTLRLTPSNPTASVIADHQDPGQ

SEQ ID NO: 398 - protein, 486 aa, synthetic construct
  REGION 1..486: note = Synthetic
KENLVLKMQVTADPQTLSELDGQSRICNWLYNHLLEKSLELKREFIHSGNPEASKTIYTKRGLRNVLPTLKVEHPFLKVVHSSPLKNTALRLSEAIRVHQKSKKGKRKGKQMGWPKFRAWRRDWFSLLYDEPEKGFKIQETSLILSLGMGQDRKHRFLVLDLPEAHLLKGKTLRNLRIVSELGNYYAVFTIQKELPIRKPISKILSLDPNHKNLAYGVDTEGTAIEIAAPKWIKTYDRRLDELKSKRDRCNKKSKKSPVLDEKGTPTGKEFYLPSKQWKKYDDSFKCALRKRREQTKTFMYTSAHRLFRDYDCIGIGNYTPNGAGITKPMRRAMNNRSLIGRWKNTLSWVARKSGKIYLEFDEKGTTRTCSHCLHVEEHGIHVSLRQWQCPQCQTEHIRDENSAINGLRKILRDLLQKNEGEYPLIVSGSDLAFVKERWAWCVLPGGVLVTPRRQNSEIIRSTRKLNRGHDSPRSKVDHLVMYDHV

SEQ ID NO: 399 - protein, 481 aa, synthetic construct
  REGION 1..481: note = Synthetic
VAAVECAIKLNLELSPDDERIIEGQMKICNWLYNQLVQRANELRDSYVQNQDAEVAKTLYGNRGLRDLVPAIKETHPFLKSVHSSPLKNAALQLTRAIQDYQKSRKGKRQGKPTGWPSFRSHKVKPFSLLYDEPGKGFKLEGRTLRLSLGQTSEGRRIYVTGTVEKPLSSFDDAEIKQLRIKREHDRYFAVFSVVRKFRPESRQGASAQAPQVIALDPNHKNLAYGVDSSGQAIEIVNFRGTKYFDREIDRVKSKRDLCQRKSIPVTEDGKFIYFKPSRRYQRLQKTHRRLLQKRRDQTKLMLQTIANFLCKHYSVIAIGDYTPRGGGISKSMRRGMNNQSLIGRFKLVLKWVAARSGRIYIEWPEHGSTRTCSECGYKLATGLTPDIRRWDCPACGTHHLRDENAAINGLKQVMHKDLSCSDQIPPVTRRHSARFSGSGIERTPLDATGKPSVTTTRVVELRTKRCEPDGRRSVPHGATA

SEQ ID NO: 400 - protein, 506 aa, synthetic construct
  REGION 1..506: note = Synthetic
PTTIQFARKVRLVVDADAAGKLDGQSKICNWLWNRLKDEVETRMAELSIVGGYGYLDEARTKKLLSEVYSEIGLRNLVPPLKERHPFLRCVFSSPLKNVALRMAKAIASHRKSKNGQRCGPDVGWVKYKAWAKHWMSLEYDEPGKGWNVSQFGWLNLSFGANAQGQRLSLRLKMEKTPKEIASARTCRIVREGRDRYFAVFTFKGQKKARQRGTRVVYIDPNLKNFGYALDTEGRAFELSNLEKLKESERILDRLTSLRDRCIAKSLWVDTVHGDGTVSTHWRPSRRWKRLDDAVERMQTKVREQKKHFMYSLANQLCRHYDVIGIGNYVPENTNHGKGRKYNRAVRNRTMHGAFKDILSWVATRSRKHALVLDETGTTRTCHACGHVVEGGIAPAIREWDCPGCGTCHLRDENACQNGLRRLLTQVGDAVDCSHLPCSGPVQIIGRCDWRFHPQGWTGVPRGGANVNSMRLPEYRQRMRALPRARVGDRASKSAKTSPSAMRRLA

SEQ ID NO: 401 - protein, 333 aa, synthetic construct
  REGION 1..333: note = Synthetic
MEKTPKELASARTCRIVREGRDRYFAVFTFKGQKKARQRGTRVVYIDPNLKNFGYALDTEGRAFELSNLEKLKESERILDRLTSLRDRCIAKSLWVDTVHGDGTVSTHWRPSRRWKGLDDAVERMQTKVREQKKHFMYSLANQLCRHYDVIGIGNYVPENTNHGKGRKYNRAVRNRTMHGAFKDIVSWVATRSRKHALVLDETGTTRTCHACGHVVEGGIAPAIREWDCPGCGTCHLRDENACQNGLRRLLTQVGDAVDCSHLPCSGPVQTIGRCDWRFHPQGWTGVPRGGANVNSMRLPEYRQRMRALPRARVGDRASKSAKTSPLAMRRLA

SEQ ID NO: 402 - protein, 520 aa, synthetic construct
  REGION 1..520: note = Synthetic
SKVDTFVRKVRLDLRDGDAAVLDGQSKILNSGYNRLVETMRNAERRLAELGALLYGWTGTKDDEAEHNRVPEHEALAFCWLDADVRDELRRERYDLLTMLTSKTGLRDCLPGMKSAQPYLRAVHSSPLKNAAMRLSAARADWKSGKLSGGKPAGRPRFRAWKRSWFSIEYDEPTKGWSVENGTQLTLTFGTNEAKERMARTFVLYKPPPGLSSAKAVRIVKEGEDYHAVFIVWRARRDTRQDKGDVVYIDPNSSNLGYLADSKGRLLEIENIPGVKELDRQIDVVKSLRDSCVRKSKKVEFIREDGTTHVHWEPSKRWKRYDGAVECLQKRRRDLIKHALYALANHLFRNYAVVGLGDWVPENESVDMGFGPAADRNANRKLRNTTFHGMMRNIIAWVARRSGRLLAVVEEEGTTRGCHVCGCEVAGGVPPGVKHWTCPHCGTHHGRDENAAINGLTRVGRAVAALSGGNPIDVRPSLAQASLRGVTRFGRTRSWETSPVKTNREIKHRDWEPGGLRDQV

SEQ ID NO: 403 - protein, 271 aa, synthetic construct
  REGION 1..271: note = Synthetic
LDIPLAERVPGLDTARNLRIVKEGQTYFAVVTLRRSMPEPKPIRKAVALDPNHKNFAYGVGTDGKAFEIQNLGGLRETDKRIDKLKSRRDRRQRRSRLVEVVRQDQSVGRHWEPSRRWNRINQALKRAEQKRRDQTKHFLFSGSNKLCKNYDLIGVGDYAPAQGDAGLGKKANRAMQNRSLLGRFKSILLWVARRSGKSAEVFDETRTTRTCSEPDCGHIVQGGIQPNIREWTCVQCGTTHIRDENAAKNILVRMLRIRSLTPRTHAFSGI

SEQ ID NO: 404 - protein, 436 aa, synthetic construct
  REGION 1..436: note = Synthetic
MLFTQKIQLNLTKEQEKLLDSQSKICNWLYNKFLEKEITAYEMKGKYLGYFNHNHQFSAFKNEHPFLKVVHSQVLKETLRRLHKAYQKFFDDNKQGRKTGIPKFRSWKRKWMSLVYPEGAGIKLSRESGRIQITFGKDAQGKQLRIIVKLNEPLKRTATKGHNSFGQVVITKDPNGNYYACFTLEKQDPEEHKSTEKVIAIDPNHKNSFVGFDGEKAIELASCYVQKNLDVTIDYIKSRRDKCNKKSKAVFNPDGSLKYWKPSRRWKQFNRVLNKLYAKRREQMKLFAYTVAHWLERHYDKVLYGDYTPWASGLKNTHRSMLSQGYVGYLRSIVKWVFEKGGKVAEEVTERKSTKTCHCCGNEISMPPEKRFFVCSNLVCNASLPRDVNSAINLYNWHHFSSKKRPRKVIKKPNAEINLHLKWIPFFGLEEIYSVS

SEQ ID NO: 405 - protein, 469 aa, synthetic construct
  REGION 1..469: note = Synthetic
IGSSFASIKIPLTLSSEQEKIIDSQSLLANKLYNLLIEEVANEYIIYCEAIKNTRPEYWKDLTHPINAYNIRNKVPVLKEKHQVLKSVYSDILKNIGFNVAENWKSYFSKRKLDFSAKPPTFIDWKEKFCNLVYLYDKSAEPSSNGFHYDNTTKSFTIKLGYKEVNGKKEKLNLTIPAEHLFLKKYNQYLKKITIGKNKQGYYIDAVFNLPQENYEKKYKIKSVSKISGLDLNHKNLAHVTTSSGKSYEIKAPTKLKWFRKQISLIEKKLQDKEKKDSRSSKRLEKAKRKLNYKMREQMKHFIGFASNTLIRENDNIVIGDYVPSPTDIQKINRSIINDSNLAQFRMKLKSKCIRYAKGFEIVNEKNTTRECSYCNFNNGKIEVKIREFRCKSCGEELNRDENSSFNIMKKSEIYKSLTSKHILPLSIKDFQERGYCLRFNNQGYEVIRYQEKYYQKVVGNVDDEEVKS

SEQ ID NO: 406 - protein, 277 aa, synthetic construct
  REGION 1..277: note = Synthetic
MVALVLNKWLKFIHQTKDLVVFFQQKDKWICDLIVDEPIKYQNKVLMDTTVLALDLGLEKLAHGIDNKGNQVIIRNKAKRINQYFEKQIAKVQAKLSKKTKKSIQHKKVKRKLNQLYTRKNAQIKQTLHIQSKQLANMNYNTIVIGDLNVKKLMSTEGVNEYKKGIRKSFHQANINMFLQFLGYKCQHNNTNVMMINEQWTTQLNCLTKKLFSSKIELKDREVQLSDTIIIDRDLNSAINILNRWFDSHIASMNAPLDLSSVLVKFNLYKEATKSLV

SEQ ID NO: 407 - protein, 414 aa, synthetic construct
  REGION 1..414: note = Synthetic
MKTYSIRLFPTQEQILQLNQLSNIRMDVWNTLIDIQQKYYEINKKIYSKFELINLLPKLKNVTKPEWKLLNAKAIQTIATEVSQSYQSFFTLIKKDNTAKPPKQKELGRYHTLVFNQSGWVFKDNKIQINKILFNYKSNLTNVSELNIKQICVKFNNNNNKWLCDIVINDTISYNDNVIINTKVLAFDLGLKNLGTGVDNKGNVFILKNKAKKINQYFGKQINEIKSKLSKKEKGSKNYNKLNKVKKKLYSKKNTQIKETLHIQSKQLVNMNYKTIVVGELTIKSLMSIEGINKNKKSIRKSFNESNINMFLEFLKYKLQNKQCDLIKINERNTTQLNSLTGKIFKNKVELKDRIVKLSDKVEIDRDLNSAINILKRYYDNHLASMTEPLDYTNVIMNFNVCNNHSSIGNFIVF

SEQ ID NO: 408 - protein, 416 aa, synthetic construct
  REGION 1..416: note = Synthetic
VKTHCFRIFPTKEQERLLMGLSSIKNEIYNYFLEVQQKRFEEKQPLLSVYNMHKMVTSLKKSKVCSHWKKLQAKAIQRVITELDGGYKSFFRLIKKDHTARPPQKRTCVNEQFSTIIYNQSGWSFKKNYIVEINGIPIKYSATHLPGIKSMEIKELRLKKRNNKWLCDICVEESRVFLDITTNNKVLAIDLGLEKLGTGIGSDGKVVIINNKARKISKYYSKIINEIKSKQSKKEKYSRKWKHLQQRKKFFYNKKNSQVKQALHTQSKNLLSMNYDIIVVGDLNVKRLMQNPDSKLKKMSRSFGQSNVSMFLSFLKYKAEMKNKHVVKTDERQTTQLNSLTDKLFKEKVELKDREVNLSTSIRIDRDLNSALNIYRRWHQNHIAAVAPPLESFLSGVLDKNNIFIKKSIDSISTKV

SEQ ID NO: 409 - protein, 383 aa, synthetic construct
  REGION 1..383: note = Synthetic
NHIYSKKIKIYPTKNQKETFDFWIRKCKYLYNVALEEKIVYYKSTGKYLNIYEQKKELVDIKDFDSSWKDVPNKSLQEIIFRVDKSFKSFFKGGGFPKFKSDLNSIEFVKNDVRLKDDKLYLPKIKSSIKFSENIKNNWTSVKLNKNKDNYYLIFYYLDEKEINLINNDILGIDLGLISLYTDSNGKKVNRFSKKLVGKYYSRISELKKSLSRKMKGSIKSKKVKKLLGNTYDRLKTTKNDYLHKESLNLVKNSKESIISLGDIKIKSIIGSKYSKRGLIKSFYLNSLGIFKQYVVYKSTKNNKLCLLVDERMTSKTCSCCGNKKYDLKLSDRIYNCLVCKNSIDRDENSAINMKLLGSSSLSKDKLVSLTGNNKILTFGYNL

SEQ ID NO: 410 - protein, 625 aa, synthetic construct
  REGION 1..625: note = Synthetic
MLPRKVKYKRENDPIFISFKNRINQYGNTLPIPDLSNVKPINIKNSWYTNKIFKFNTNDTNNNPINIDYANLVKLQFSTKAIKIRCYPNEIQINILINWFKADIELYNATVLFLRKTIPYIFIQQYKKSYGKKKYSYICQKQIDTLNHKKNIIKNKKNNATTILNKKLMIRNKSKKDYEFIIDKKKQISKLNEDIAKINIEITKFIEKKNSCNIYVDFFNKSDVLIKKYTDYKYLRSNELKTIRDEIYNKYKDFGVLAHSLDASIKRACTSYKSGITNLLENNCRRFRVRCLSNNNKGMIEIEKQAFNFDKNEKNYQICKKTLGCMEYKYNNREHFITIPSTSYFSYDGDKYWLLYSTAIEEKTNIEPKKLYAGVDPGIRTFNTIFTPYSIVNYGTDVYSQIREYLLKIDKLKTKHTIEEEILKCNKIINKHVEILKILKNKRYNEITDKNIKRLERQINFNEERIKNLKKINGNDKKKEMYEKNMNKRKEWKGNFYYDKIKRKVTELHWKTANDLAKNYENVIIGRFSMKSICEKDDVCEMVKRVGTLMRHYDFRTKLVYKCLTNKTKILVSSEKYTTKMCSICGHYNDKIKGEKEINCEGCKKKYPRDGYAARGIVINNLKIK

SEQ ID NO: 411 - protein, 704 aa, synthetic construct
  REGION 1..704: note = Synthetic
MLRRKIYRENDNRFLELRSKIGQYSNSVCDITHFNKFCIHNNNTWFNTSIYNIDEKYKGNILPEHIDLSKADDRDFTRKTMQIIMYPNDYQKSIFDKWFDSFARVYNATIIFLRKHLPYGTIKEFKMLYNQNKILNNILKNITRDKNELSKLKLKLDSLYSDLNNLNLIVRKKKNDINKIERIKINITNTGLSIKRLNINIQKLYCSAKPYKCFAKPYETLKIHKYDMLNFQNIRTNDLKTIKESIKEKYSYGIRDEPKTCIPSHSLDGAIKLACSSYKTSIDNFMNNRIKRFRIRCRNLNGKTKLMEIESVYFINGINGFQIKESVLGKMEYTYNGNPYTLTENNTSNIHYDGNVYRLLMPVKIEDSEKSTQSKYVVASLDPGIRVFQTIVTNEGMIKYGINANKMISNYLTKIDKLTDKKTTKNEIIKCKNILENLKKKLTKVQKKLLTASEKNKEYCNITINKLLESIYYYEQKILQLMNEPNKIEKNTIEIEIERCKNTIKIHEENYKLYAENINDEIGEIFRKYIQRMKKLLKCIKFNEQRIEKLTKINENPKKKEKYEKYMRYRKENKSKKYYEIINRKVKEMHWKIARELGSNYETIIIGKLSIHSIVQQDNLDSMTKRVGQLMNHYKFRERLVYKCRTLGSEVIVREESYTTKTCPKCGHFNDWIKAEKFIECESCKKKYDRDGGGATNILIKSLK

SEQ ID NO: 412 - protein, 656 aa, synthetic construct
  REGION 1..656: note = Synthetic
MRRFIPRTSDNEFIVLADNISTYSTHYVDISTIPAYSTNIKTNSWFTNLCSNYSLPYYEPSFNFSKCENVIPNRKTIKINMNLNNKQKLILDKWFYSSNLMYNQTIIFLRKHISYCSIQNYKSLHNLMPKYYENCKNMKNTKHILYKKQMLYSSVLVKLEKLYITDNKTKKEYSQIITLKKKISEINIQITKLNIELDTYSKKNIDLSKQYHNYVQLEKHINTFLSYEHIRTKYLKKIRDNIALKYSCYNDDRKYKIHTHSLDGAIKQACANYKTCITNLLDGNIKRFRVRCRNSDNQKKLVEIDSESFNGSENNYCICKKILGNIDYTYNNNKYTLSTKQTSTIYFDGSKYTFLIPIHIEKPFATVRKPYTALDGGVRDFLTGFDNNSLKNYGHNVANVLYKYFNKIDKLKSVSYMGDYTNLLNYKNKLMSKKNYLEDVYICDKLEEIEEQLKYKSTSIEKIIENCKRIIKNNEKLINVSNDKNKIIKLYASINFNKYRIEKLSKMNEKEREKYTKYINYKKANKVQFLNKKIKWKIDELHWKIARELCENYEMIILGKLDTQSILKNKDLNKGTKRVLQSLSHYKFRERLVYKALSLGCKIIVQNEKYTTKTCTLCGHYNEWVTTEHTIDCKGCKKTYNRDNNGARNIFLKSLA

SEQ ID NO: 413 - protein, 566 aa, synthetic construct
  REGION 1..566: note = Synthetic
MNYIQKKAKRRKKHKELSEQYKQINAEKIADFVNKIALHKDKLWCPTLYNKFAWQYTNSCYDMSICRSNKSFDEVTFISNKINDKVDDKLNDKVDENTKCLKINMVVTNEQHKILQRWFNSYIMMYNETVNYIKSKLSFNDIKLLKNSYTIEKNLNSLKKTNTKHLTNLQKQKTKLLSSLNSIIKKKNKGWNKKLDIIRNDIHVTNQNITNTNKELHNLNIEIEQNKKYHKKVYNIVNFYKLRTELKNNRETIIETSQHDQLNYNTKINVHNIDYAIKSACTSYKSCITNYINGHQKSFRVKFMRLNKKRKVMDIESSFIKQNQICYKILGEIKYTYNNMPYILTSTKNVKIFYDSELEMYNLLVPEIVNTPQTTAKRYIGIDQGIRTFATGLSNDHAIKIGTNMSGTIKKYFKRIDTINAKEENEKIRKRKVKKYTRKMKAQIDELHWKSINFLTENYKDIIIGKFSIKDCIKKEDSVLDKMTKRIGQLLSPYKYRQRLQYKCATRGNNYIEQDEGYTTKICSKCGNYSKTIGGKKVYDCNKCHVEIDRDVNSGRGILIKSMKSE

SEQ ID NO: 414 - protein, 590 aa, synthetic construct
  REGION 1..590: note = Synthetic
MIKHKFRDKKFDDFKNKIPDNTDKFWCPQDIKFSKIQSNSCFDFQHFIDQNSAFNELETDASVPKFKDKLIRTISVLAHPNEWQRLVLNRWFDAYIIMFNETIKFIKSKFNSRDLSTVKHMKIKVAKLFRDMKDNDKCVKTMMTDIEKIRKNLVKLRTKRKLEKNDKKKDNTKNKAKSKIKTKIKTKISTESKIKELENQLKVSKIELVELNKSLHMKTMNHNKAKNISNRFENNIQKFLDYKFLRTKKLKEIRDRIQKNSQIKHEKRKMEIHAHTLDTAIKNACSTYKSCVTNFLDGNIKRFRVKYWKLNRKNKLIELEKSTIAQYNDIPKNKKKSSTEDSTKPRYTIAPKILGMMKYSRDGKEYELRLGTIFVRYDSDSGKYKIDVPDEIKQKELNQNNRTVSLDPGIRTFMTGMSNNEVMKFGTNIFDKVKSYIKRINNAKQTIQDNNRIRGIETKYNSKIKRLVDDMHWKIANNLTSKYKTVLIGDMSSKQICRSNNKILDGLTKQAVMQMNYYIFRKRLEYKCAVNKVEYKEIDEKYTSKMCSKCGWCNEKLGGSKTFTCQVCKLHIDRDVNACRNILIKGLKIK

SEQ ID NO: 415 - protein, 526 aa, synthetic construct
  REGION 1..526: note = Synthetic
MSSKKILNRRQKKKKKKEEKLKRRNLEINNYKKTIIKHTNNIWIPPHNIKYKNTDTDSWFTIKKYEDKKNNKIDDFKCNIPTNKNKAKKLMPCTKVNFYPTKMQKIILERWFDAFALMYNATLKFIKQKFKENKDNNNNAEATEKKSTSVVKTISKKKIKIVAKKPKKKINPTNFYNNRKMLKNKRCEIETNSTITNKKQLDVINSELKQRKNTKKKSKKIKPVRTSINSHTLDYAIKLACINYKSALTNYRNGNIKFFRIRYWRKNRGNKILVVEKQFIKKNTIFQKLFGDIDLEYNREKYTLKAKSNITIHYNSKEKKYLLLVPEKCEVKEAVKKNKTIVLDPGIRSYMTGISKNEVIKIGNEQDKIKEILMRKDRIMENEKVPYVKKKKIERRLNTRIKNMVNELHWKTINYLVNNYDNILIGDMSVKSIVSKNESTLARITKRIGYSLSLYLFKQRLEYKCKLNKKRYSEVNERYTSRMCSVCGWYNEKLGGDKIFECKECKRTIDRDVNGARGIYLKHLQK

SEQ ID NO: 416 - protein, 463 aa, synthetic construct
  REGION 1..463: note = Synthetic
MQTKKKKKKYSRNKEPNYIKFKNQIKNNSNDIWIPYTSSRNNLIKNNSWFDINENKYNSNKNVCTDLNFSEKIIPKEFYKCIKVELQLTLEQQIIMQRWMKAYIHMYNETLHFMKNQPKDKFCTSFKTIRTYHLKSVRDKLIKESQCANIIRNTCIYTHIMDAAIKLACANYKSAITNFKRGNIKNFRIRYWRFNKNYNIIDIEKEYFSQNTIGPKIFGLIKAKYNNSDFNLNLIPTKYNCSCKILYEKYTNKYILLVPEIVEKQNVNQTHKLISLDPGIRTFLTGLSENETIEICNNPINKIKPIIKNIDKINKLNKLKQITNKKYKRITKRNYKKIKDLVDELHWKTINYLTNKYKIILIGDMSIKEIIKKETSVLSNMTKRIGSSLSFFKFKQRLKQKCYLKDCKYEEVNEMWTSKLCSCCGNYYNESLGSNKIFKCPKCKTIINRDINGCRGIYLKMTK

SEQ ID NO: 417 - protein, 460 aa, synthetic construct
  REGION 1..460: note = Synthetic
MKRKKKKHYNYLEDSEYIKLNNSIIKNNDKLWLPKDEISYDTINTNSCFNIYNHKNNDSFKNIKNIKFINSDKSNNKIYKCIKVELKLNDYQKEIINRWFKAFIIMYNETLKYIKLRKSNNEQLILNFKTLRTYHLKEKRNEIIENSQHPKYTKDTKIKTHIIDKAIQLACANYKSGLTNLRNGNIKHFRIRYWKITKDFYTLSIEPSYFTKSSLCYNILGNINAFYNNEPFDLNLINTKYKSECKLNYSKIINKYELFIPEKAEVNNIIKEKKQFISLDPGIRTFMTGLSNNDCIKINFNNNKIKNILFKIDKLEQIKKKNKYIRKQLFRKRLKIKYLVDELHWKTINYLINNYETIIIGDMSVKSIVNNKTSNINKITKRIATYLCFYKFKQRLKYKCILNNCKYIEMNEKYTSKICSNCGNYNKLLEGNKIYNCEKCSITIDRDLNGSRNICLKCIK

SEQ ID NO: 418 - protein, 480 aa, synthetic construct
  REGION 1..480: note = Synthetic
MINEVVDEAERKRLYQARVKKDIKRYTSYVNNYSNTILRPQPDLQYTKIPNTNTWFNIEKHDMQNPEFNYKQVNIKPPKKKQKIPYRTIQVKLLLSANQRKVIDRWFNACILTYNETIKYLETINRIPSFISLRKLLSKKRDMYKLRSKPFKSAHIDTIIPTHILDESIKEARTNFKNAKEVNGIVKPKFFLEKTKVMHIEADFFNPTSVFRLQVNAAIYENQPYNLDDIYNIHGSTCIIQKYYNIYYMFIPILVIVKDSHPRKNFIAGDLGSRKFMTAYADGEILKIGEGIHDTMSKCITREKQSRQIMKQELNKKSELLKLNQTPEIKTEIKKSKLNIKRLSKNSKQCKKRMLNLSNELHWKTANYLTANYKNIIIGDIKVSQIVKKKNNLPKIVKKVMLKLRFYKFKQRLKYKCQANNCNYIAVGEAYTTQMCSQCGERNLNVGASKIFTCAKCHSNLDRDVNASINILIRYYGENK

SEQ ID NO: 419 - protein, 478 aa, synthetic construct
  REGION 1..478: note = Synthetic
MKKNKRKNYRVEFLNKFKPIVDKHKDELPFFKMDKEYRNQEYETHSWFNISREKSKKTKPIVTATDKLDKCKCKAIKIKMILSDTHKQILQNWFNAYTMIYNKTLDYIRENFQFTKKEVNRDILSNEINNNQNFYNKFYIRNQMLEEKKKIQKNFSLIIDKTKTKNKLEDIKCEIDIHTLNKSIFQLVENIKACKTNMMRGNIKRFRLKYWKYNRPSKTMELEKGKITDGILCKSVFNDLEDIKYYYNNKEYKLDDITHDFKINYNSILDEYSLYVPISISKTKIENKRKIIILDPGLRTFMTGLSDYEKFNICPDVNKIIKKDIKRLNKVKNNNLISNKIKKKTEKIINRKIINKINDMHWKVVNFLTNNYDTIFLGDMSAKGIVAKSNKVLSKEMKTACLRTRYYEFRLRLKYKCSVTNTKFKLINECYTSKTCSHCGNYDNNLGGNKIYNCLNCKLKIDRDVNGCRNIYMKQFIK

SEQ ID NO: 420 - protein, 564 aa, synthetic construct
  REGION 1..564: note = Synthetic
MKPKKKDIIKKVKPSYKDNPNYISLKNNILQYQHTVYNPDFKKSNIKNKLNINSCFNIDFYNDNINSNIPILKDNLFLENNTKKMTISQKIILTLNDKQKHILKIWFKSNDLMYNETIKYLKDNYLSMKTEFSDNIFITEYIFFCDASIKDISTIKKNFNTNKKSLKKFEKDDINIYKNELINVLKKNIILDLKIFILNNNMKNKRKDIEKYLKNKPYTISNNKFKLNFQNIRTYFLKDIRNNIIKTCNSNIINKDIKIKTHILDATIKIACANFQSSITNFENGNIKHFRIRYWKDKRDKRVLEIEKCYFTKGSLCPSIFNNINGYIKKNGKKQKYDFNNINSTVKLQYNKKIDEYTIFLSKDIECLENKNDNKKNLISIDLGLRTFATCLSENQTIDICKTDDTKLKKLINKRLEYKNILKNYNTKKNNKKLRMVNKRIKGLIDEVHWKTIKFLTSNYKNILIGELSTKGIVCNNKSILKSYNKELAYAYSFYTFRQRLEYKCIVNKCNYKGVNEYYTSKTCSACSEYNEKLGSSKVFNCPSCKNVFDRDVNSCRNMILKCV

SEQ ID NO: 421 - protein, 443 aa, synthetic construct
  REGION 1..443: note = Synthetic
MKDVIIKKIREQVLLHKDDLVVPKEYLLTNNKGMCKKLSKIDQNTWFSLEKSDLFKNDFKLENPKGLLKDKILCRKIKLKLAKDQKFKLDIWFKACTQMYNESIVYIKKTKCTAKRKVRTELKEIRDDIKRNSGVMLGKREIKIYTHTLDSMIGLACTNYKSAFTNLRNKNITHFRIRRWKFNTNKIIKLEHQCLNKPKATFYKLFGNLKTYYDGKEYDLTTIDKECVLKYNVQSNEYYLFIPVDKIAERSENRSNLICIDPGLRTFLSGVSNNHILEIGNNIQSKIKRKYLDIDELKKRKINGKKKKKILLRLRRKLKNLKDELHWKSINYLVKNYDNILIGDLNSKGTVKRGGVLQPMSKRMMYFYSFFQFKTRLKDKCEQYGCTLNIIDEVYTSKMCSSCGNIKTDLGGNKTYNCTNCNLSIDRDRNSCKCIYAKNFLKK

SEQ ID NO: 422 - protein, 441 aa, synthetic construct
  REGION 1..441: note = Synthetic
MRKKKKNLKENIINHHNDLWIPSNDLEFEDIKTNSWFDIKYYKSNHTTFENNLKIKGEKIKTKIYCKKIKLDLSTEQKEIINRWLNACSIMYNETIDFIKQNKQEGFDYKKIRTYHLKEKRNEIIEKSKVLIIERNTSIPTHIIDCAIKSACSKFKSAITNYKNGHIKHFRIRKLKHSRPNKVMEIEPCYFNLIKNDKVSLCYKILGDIKYFYNNQEIKLSKINHACNLQYDSKLKEYNLFVPELNYDVSNIKKKEVISIDPGIRTFMSCITENEVIKFGTETNQRIKKELKKIDYIKTIKCKKKIKKKIENRSNKKINHLVNELHWKVIRYLTINYKIILIGNLSTKGIVKNDKSNINKMTKRLSYALSFYRFRQRLEYKSNQENVSLKVIDEAYTSKTCSNCGSYKENLGSSKTYNCNNCNMIIDRDINGSRGIYMVSH

SEQ ID NO: 423 - protein, 457 aa, synthetic construct
  REGION 1..457: note = Synthetic
MNQKDKLIQSITLNIDKIWKPKASYKFKNMNVCNSSTWIKSSFALQKPDQRSASSSFQKDKFDVTHINEEPLKDKQLFRAFKVDLDFTKKQKRIINRWMNAGIKMYNKTIDLLKNKHEENCSFFTIQNLLKNDKRNIINSSAINPIKSKKPIGNVLYTGIPKIPVHVIDKSIKLACSNLKSALSNKENGNISYFRLRRWKFGKKVKLLGIEKGMFRKDTIFPSIFKKVKAFRDNISFDLSTIKCDSKLFSSDGKYYLLVSEKINNEIKQKEEKPVSIDLGVRTFITGISNDEIIKIGTNNINKLNMIEDNITKAKNNHNKRREKQHRAKLKNMVDELHWKSINYLINNYSTVIIGKLSTKNAVENGKSKLISKMKTLMLSLSFYKFFQRLIYKCEINRIKLKIVNESYTSKICSCCTNCKDDLGSSKIYKCDKCGVVMDRDVNGARGIYFKSFPIIE

SEQ ID NO: 424 - protein, 443 aa, synthetic construct
  REGION 1..443: note = Synthetic
MRRKINIDQQKLLIDNISKYKNNIWCPKINLQMNKVNNNTWFTEYCSINKKVNVITNNDKKILKCIQVTLELKKEQKIIINKWLDTFIEMYNLTLKHIKQKFILIKDNNKSRKINKIIVNYFKIKNELKIIKQKLINKILNKKNKIPIHELDKAIKLACSNYLSAISNFNSGNFKKFHLRYWKQTKNIKIMEFEKTSITNGNICKTKLGKVNATYNGVKFELNNIKHDCKLIYKDNKYILSIPIDVKQKQIVNRDNLISIDLGVRTFITGLSEDHVYEIGDNCYEKIKQKLLNIHKINNNKNIPVKIQQKNEKKNYKKLQNLTNELHWKSISNLVKKYDTIIIGDMSVKKIVSNNNVNQMNDMVKQVLNKLNIFKYKQRLQYKCEEYNVKLKIVNEAYTSKICSCCGKLNKELGNNKIFKCKSCNIIIKRDINGSRGIYLKSL

SEQ ID NO: 425 - protein, 521 aa, synthetic construct
  REGION 1..521: note = Synthetic
MKKKKKYNNLKYQELLYSIKKYSKYVPLYDIFFENPNRLETHSIFNMYNYNIFESNNYSYEFKNDIDFDEKKIIACKKIILEPNEEQKIKLLNMLEGYRLVYNKTIKFFKERRYNYSHEPKINKDNITVVKKKIKANIKKNEIEKDVIFTVNNILKNICKEEDKEKRIDRVSKLKENNSIITDEKIIRTYFIKKDINRISKEYKTPVHCLDYAVKLACSSYKSALENLKNGNIKHFNLSYIKKTKKSLVMDIEKVAIKSNTIYPSLMGKKLKNKENLEYSNVFDCKIHYNFNKKQFTLLVPIEKDKNIIENNNWICIDPGIRTFLNCKTNNGFIEIGKNLSNKIRSKIVLIDKQENIKNIELTNKLKAKISNISNINNYIKDKKCKIRNKIKNWVDDSHWKIINYLTSSYKNIVIGKWSTKSIIKKDDSILSRLTKRVTQNLSFYKFLQRLKYKCKIGENNLRIQDEWYTSKTCSNCGWKDENLGGNKIFNCKNCNIQLDRDYNAARNIMLKSLLSVNILS

SEQ ID NO: 426 - protein, 512 aa, synthetic construct
  REGION 1..512: note = Synthetic
MVKYKKSLDFYNQKYNELKNNIDLFSNKVPLYNIFLSNNKLVTDSWYDAKIYNSSVKDNNNYTFIDYDLERPKKILKCEKIILLPTKIQIKSLLNMLEGYRLIYNYTLKFIKTREYNNIHNKRIILDNEIIDSNEKLNYLKEIRDQKKNLSDNEKICVSLIDDVIGNIFKKDIRQSKISKLKEDDNNDMILDDKILKTYFLKDEIHRVSKKFKTPVHTLNYAVQLACASYKSCLANLKNGHIKNFNIRYIKSTKSSLIMDIEKCVINKKTFISSVVGKEIKNTQNLDYIANNDCKLHYNRNKNIFTLLIPKEIPEIIKKNEKNEYISIDLGLRTLMNCKTNKEYIEIGNNVKDKLKKYLEQEDKYKLIKNNKIKNKLLKRLRENIKNKVDDLHWKSINYLTSNYKNIIIGKWSTKNIISRKDSILHRMNKRIIQSISYYKLIERLKFKSIINNNNLIIKEEWYTSKTCTLCGNKKEDLGGNKIYSCVKCNLTTNRDYNGCRNILLSCIKSIN

SEQ ID NO: 427 - protein, 649 aa, synthetic construct
  REGION 1..649: note = Synthetic
MKKSKRKKNKIERKIFHSGKLNEMKNAIQIHKNVPLYNIFFENSIKNDINSYCDINIYNVDNIDTNKYQFKNDIIQKINRKTKKPNVLLSCKKIIILPDSKQKKIILNMFEGYRKAYNLTLKFIKTREYRRKKYLLNKNIETEHIESENIETEHIESENIETEHIETEHIEIEHIESENIETKHIESENIESENVESEHVETKHIESENSKKTKEEKKKELLEKVDKLRKNNNLITDFSIIRTYFIKNELKYLAKKYKTPVHTLAYAVKLACASYKSALTNLRNGNIRYFNVRYLKQNKNSHIMDIEKTAFSNNSFFSTILGKYIKTKPLYNGVLFNFKSVKNDSKLHYNKKTKKFTLLVPEEYTEHYNKKLKLYEETKDITIDKTLKQRNINKPKNKLLIKKEKYISIDPGLRTFLNCISNDKYIEIGKNMRDNYYKLFKKIDDIEKSEYFKDKNKINNKKTYNIKTKIKRTNKCRNKKENKLYRFYNKININENLDINEKTKLINKCTENLKHKLKNKIHKRITNITSDIHWKIINYLTNHYNHISIGKWSTKSIIKNDKSILNSYNKRFAQSLSFYTLLQRLEFKCRARNISLRIQDEYYTSKVCTNCTYKNDMLGGNEIFNCPSCNISIKRDYNGARNIMLKSLL

SEQ ID NO: 428 - protein, 444 aa, synthetic construct
  REGION 1..444: note = Synthetic
MKSKKYKHNLKKSHIKLIEQLNKKYSNKIPLNELFNDTPNVINSDSWFSISKSDNFNKDNLLSFNNNINKDKLIKCKKVILLPSNEQKLILLKMLEAYRIMYNRTINTIRKRWFNNERTNINFQYLRTYILKSEKDDLIKQFNVPSHMLDGAIKLACASYKSAFTNFKQGNIKKFQINYLKNSKKSHIFDIEKCSFNKNTFYSTFLGKIMLNNENYDYSNINKDSKLHYNVVSKRFTLLIPIDINEKNSTDNNDYISIDPGVRTFLTCLTNSDTIEINKETNNNIGGIITKIDKITDLNNIRNKKFAIRKRSLKIQNKIQDLHWKSINYLMKRNEKHILIGNWSTKQCISRCGNLNKLTKRISSRLSYYQFLQRLKFKCNEYNKDLHIVDEKYTSKLCSNCCIENETLGSSKIFNCKNCNLCLDRDINSCRNICIKSFSKKFNV

SEQ ID NO: 429 - protein, 430 aa, synthetic construct
  REGION 1..430: note = Synthetic
MYKRQETINKIKILIKKYNNKVPLNDIPINNFIQTNSWFDIKESNQFDHINQFKFNKLVDNNKIIKCKKVILIPTIKQKKLLLGWLNSVRIMYNDTIRYIKYRYWNNMKTTTSFISLRKELRSKKLNLIKIYDTPTHILDSGIKLASISYKSAFTNCRNGNIKHFNIRYLKEKKDTHIMGIEQQYFSKNTICVRKLGKKLLNKSNISYDEINKDCKLHYCKLNNKFTLLVPVEQPKYERVENNDYISIDPGVRTFLTGLSNNNHFEICNNMYVESKKILKKIDKSEKYIKDNKKCKNRCRLLRNKLKNKITDLHWKSINYLINQNKNTIIIGKWSTKSCISRKGSLNKMLKRVCSSLRYYDFLQKLDYKSKCHNINLKIQDEAYTSKLCSVCGKINNKLGSSKVFKCTNCNLLYDRDMNSCRNILMRSFE

SEQ ID NO: 430 - protein, 461 aa, synthetic construct
  REGION 1..461: note = Synthetic
MPRKRIVRNPRRAAIAKKRKKMNAVRSAKLKDMRERVAKYSNFIGLPVEKNKIPINGKLVNTIDSNSFFNIYETRYSGQIMEGIIKTEKPSIVKKSVRIPLNLTLNQQNIILQWMKAAECMYNETLNYIKANRFVGIKSTINARKLRSIMKNEKDIFAKKYNTPVHILDGAIKRLVQGLKSAFSNLKNGNIRHFNIRYLKHNKPIKVISIEKMYFKENTFYPSYMGEDVDSGEIDFKTHITSDCTLQYNKKGNRFILYTTKNCDVKIYDTADTISIDPGIRTFLSCISDFNIYEIGKDKEIPEKIKYHLETMDNIKKKSIPQKIKKRYEISHDKKIHGLVTELHWKSIDFLVKRFKTICIGKWSTKNILSNQRSVLSPMTKRIASRLRFYEFLTKLKYKCDAFGVNLMIVDESFTSRVCSHCSWEHKKLGGEKVFKCENCTLLIDRDLNGARNIYMRALNQ

SEQ ID NO: 431 - protein, 441 aa, synthetic construct
  REGION 1..441: note = Synthetic
MKKKKKIDFIKIEDDLRNNIIKHRDSVGIPGNFNFRQCESHSWIETKYKPINEVPLITRLTAPPIEDVIKCKKVIIKFNNDQKKIVFGWLDGEIKMYNYVVALFKDYIYKKIPLTGQIVSFWFIRDVTLKDVKSALCQQYGIPPHVLDKSIKRACTMLKSCKTNHARGNIRNYRLNYIKQTVETKIIVIEKQYFCINNNSFYSSYLGDYIESYGFKLNEVDADCTLHYDVGKKVFMLLVPIKFKSDADADIVINKKTLVIDAGVRTFITGISDDHILEMGNNLKKTLTPLFNEIDAINNSDMPARVKKKKTTILYNRIKNLVTDMHWKAINYLVKTYGIIVVGDWRTQSCCSNKNTKIDAMTKRIMNQLSFYKFLQKLKYKCEVHRVSLYIIPEHFTSQMCSNCGAKNNVGGSKTYDCENCMFKIDRDVNSCRNLYMSWKN

SEQ ID NO: 432 - protein, 454 aa, synthetic construct
  REGION 1..454: note = Synthetic
MEKKKTFVNFRLENLTNKVLKYNKRIPLYNTFISKKIITTKCAYGISNHNERKIKKNKHAVTFTNNISPSVEYVKCKQVILNIEQSYKKILLGYFDDYIKMYNTVIYYFNNFKWTTDKITINFRNIRKIHSKEKKKYNTPSHVLDGAIKLACTSFKSATTNMDRKHIKKFNLKPIKLTKKSKVIDIEQCYFKDEYIFKRFLKKKITNSENYKYSNIKCDSKLHYDVTKDRFTLLIPIKTKIETTATENQISIDMGERTFITGLTDNKIIEIGTDISNQLIKHIIRIDKYNNIIDNNKNITTKNYFDKMACARKTRNQQLKKRVRNIRLKMRNQIKDVQWKIVDYLTKTYQNITIGNWSTKGCIKNGTSKLAKLKKRILNGLSVYKFKEKLKYKSESRGINLQFVNEAYTTQMCSYCSNLYPKIGASKIYNCEKCKKQLDRDVNSCRNMQMLGLV

SEQ ID NO: 433 - protein, 466 aa, synthetic construct
  REGION 1..466: note = Synthetic
MVLKKKKKLTMAQKLQIVQKTIKEKGDDYRIPLRPYYYKDAHNLRYEKQNTNSWFDSYIHYSSMMYQRPNPFFDVGCSKKTKFDDISSDGMMTMQIKLFLTDNQKIIIEKWFDMFTLMYNETIRLIKSKMFDKKEIPSITRLKKELIAQKNKIKNKSKITIIVNGKSKNISVDMHLLDYAINDALNRYNSCMTSLEKGHIKQFRLRYLKLTKPNKIIKIERLAFKKNTFYTTSLGKIVTCSTPNFNYYENVKSIATLTRRGNEYFLLLKHKKKLQKGTSANNSIGIDLGTNPFVTGYSDLEVIQIGRNITKNMKNRLKIIDKINGHETFTKNKINKVIQKKYGKIKNMINDMHWKVANDLTAIYRNIFVGNWSTKKTGQTEINPMIKRIANQLAIFQFKQKLKYKCEQKKCNYKEIDESYTTMACGRCGNLDRKIGGKKIYNCKRCKLVVNRDVNSARIITMLGMN

SEQ ID NO: 434 - protein, 314 aa, synthetic construct
  REGION 1..314: note = Synthetic
MTITDKNGKIKNVKVDRHLLDYAINDALNRYRSCQTNLKNGNIKHFRLRYLKLTKPNKIIKIEKLAFRENTFYQSVLGDTVKCLSKNFNYSENIKGVAILTKRKNDYYLLSKHNKGLKLNKYKDETIGIDLGTNPMATGYTDLGVVVIGKNMSKQIGKKIKTIDKINNLKGFLSEKKLRITNKKYKRIRDMVNDMQWKVANYLTKNYKNIFIGNLSTKKMGEGKIDKRVKRIGNLLSICRLKQKIKYKGEQRGCKYKEIDEAYTTQVCGKCSYQKKTIGSNKTYKCDSCKITMNRDLNSARIITMLGTQKTNKK

SEQ ID NO: 435 - protein, 521 aa, synthetic construct
  REGION 1..521: note = Synthetic
MNVLNKNTNIKPPDKKKAKIKKQKVDKITKEEWIAMSNERLAEFQKLIVKHRNTFKIPQKCSNNHFTDVDIHSVIDVREAINNNNFKEIPKNITFDTIVHDGFSTAPFLKLYLTKHQKIIIDKWIDCYTEMYNATIRYFNYKKFNNLSYETVNTLKLSMKNAKNKIHQSSKIIVKVNNKWTDVYVNKSILDYAINDAKNRLDACLTKMKKGIIRHFRLRYIKLTKKDRIMKLEKKCFSENTFCASVMGPRVKCSLDNYGDICSLKSLNKMYGSLCSSKNNTFNYVDNIDTVSILKKIGNEYFLLLKHSATKCTSSKTDTIAIDLGVRTIGTGYSEKKVIEMGTDMYDKMNKRLLDIDHIETLNKTKEKKAKMIHKRYEKIKNIVKDIHWKMSNYVTDNYKNIIIGNFSTKEMGENDNVRKMVKRVGQMMSMYKLRERIKSKCVEKGVRYKMINEEFTTQCCGRCGNQKKDVGAEKIYRCDKCDYEVPRDIHSSRLHIIKAMTKITKRQQIEWRKLDKERYK

SEQ ID NO: 436 - protein, 503 aa, synthetic construct
  REGION 1..503: note = Synthetic
MNNAQLGVNKRKGRQKGKYEYKKKILQQKINKYTKLFSKNINETIFIDYNTNSWFNLKIYKQPQQLFNKPKVDYKTLSHDGYYTKQYNLTPTVDQKIILREWLRDYTLMYNATTEYLRTEWFKYKILSNIGKVKKLKKNKKLKYPRKKLKITFSLNIKIVKGKLQKEKEKIIEGSIITSNKKSIKVDSHLLDYAINDALNRYKSCLTNKQRGNIGSFRLRNLKINRNNQILKLEKLAFNDSGFSTSKIGNMKINCANFNYKNNIHTVATLHYIKKTDTFRLLVKYKKKEINTKKTPENIIALDPGIRTCFTGYAQNEIIEIGTNIYQKIKIKLEYIDKIKNAKKSNYKPSIKNVKERPRIELSEKLKNKIIEKQRKRITNLINDYHWKTINYLTDTYSGILIGNFSTKSMGETKTVSKMVKRVGNSLRLNQFHERLKYRCTYTKTKYNNVDEAYTSKCCCKCGTYNKNLGSAKRYICINPSCNLNIGRDINGGIGIMISSLPI

SEQ ID NO: 437 - protein, 677 aa, synthetic construct
  REGION 1..677: note = Synthetic
MKKKKKYREVQKKKYNDFQKNIANNTKFICLPKSSEISTENINIGTNVNVVKTNSDKKIITKNFKLKTDLLKNDPIKTTQYLLLPNRKQCKILQQWFNAYVDMYNCIIRKIKNKYIKELNKNKYLKLTDLTIDLSIGCLKKEFAQTKKILINKYSQINAHVLDYAMGDAVAMFKSKITNLKNGHIKKSRLRFIKRTRSNKILKIEKYLCTDKSFCSSQIGKKMKTLPEINFKQRITTVAIIKYDSKKDKYYLYVRDQITNENNSNDIIKMHEDGIKICDDIIETSKEYEKLIIQIKKDNSNVQIKLVDTINKANKRFKLNAHKDITDQLNATSKKYNELIHKIKNSEMVDTIHILNISYMKYNDNLIKETSEQYKNLLIKIRKLTDECVKKENDMNRQLLETTDQYNNLMKIIPNKFNKMINNPIILKNNYLSNRITKSSKMYIKFIEMIKSPISLKIKNVNKESDLMKRKIKNTIKRENKKSYKQINQKKKDVISIDPGVRVFATGLSNNHLIEFGKNLSSIIRNKLKFIDNINNNETISADNKKRLVGRTYDRIQKKMKDCHWKIINYLTSNYSHIIIGNFSTKRMSEGKINPMTKRIGNMLQMYTFKERLKYKCFLKGVKYHEEDEYCTSICCSSCGNCKKDLGPNKIYNCNKCKIIIDRDVNASKNILMKSII

SEQ ID NO: 438 - protein, 514 aa, synthetic construct
  REGION 1..514: note = Synthetic
MQTKKSRYKLLQTKINEHSKHICIPNNVANKPKSDIDLNTNLMSNVKSFNTKIIKKNFQFKKDSLKNEAIKTIRYRLFPTKEQEIVFQNWFSAHIEMYNCVMNKIKSDFKSALSTNTKTKLVNLNINLDITDIKKDLSGKKSEIKEKYGINMHVLDYAISDAISMYKSKISNLKNGHIKKTRLKYLKQTKSTKIFKIEKLLCQKNTFCVSSLGTSIKSFPEINFKEETEIVGIVRYNKHKNEYEYLVRKRILHDNIKKYNFYNKLMQSYDSILSTSNQFCDLVKKINKNTDISKLKDLNKEINKQKRRLNKNIIYDNEKSYQQKQSANKNIVSIDPGIRTFLTCLSDDHIKEIGTNMGKIIKNKLIYLDKISNNENLNKKKQNKLLSKTRNKIKNCVNDYHWKTINHLTAEYKHILIGNFSTKDMGESNQRKMIKRIGSNMRFYVFKSRLQYKCYLSGTKYAEIDEYCTSKCCSACGKYKSDLYGQKIYNCLDCGLIIDRDINASKNILLKSIR

SEQ ID NO: 439 - protein, 476 aa, synthetic construct
  REGION 1..476: note = Synthetic
MNQENNKEIVKKNKIEEWKKLKDEQFKLQITTYKDTIVLPELNDINNKKTAEKFDIIDIIKTTPETKIINTELNIIFDKLYKDNTDLNDKLKKTLIYYIYPTEEQKKILLYWFDLYIYMYNKVLEKVKQIRKEENKKQNKMVKINELNLDLNLTKLKKEFSDLKKELSNKINPITKEKSKINKHILDYAIKDAISSINSIMTNLKNNHVKNTRLRYLKTTKNTKIIKIEKNICQLNSFCSSVLGKKINIKPDIKFNDITEVAILQYNKKKDTFRFLVKEKVEMKNENKINRKIIAIDPGFRTLITGISNEHIIEIGINPLKKIKPKIIKLEKIKNKKIKNKKRQLMKYEDKITNFIKDMHNKIVKKLTSDYDDILIGNMSTKSIVENEETRKEIKKEANYLKIYQLKERLKNKCIKENKRYKSINEYNTSKCCSNCGNKKINLGSNKTYECVECNKIYDRDINASKNILLKGMINK

SEQ ID NO: 440 - protein, 469 aa, synthetic construct
  REGION 1..469: note = Synthetic
MKKRKKLFNKINNEKSIKLHNNIINYGSLINLPTKNEIIFNDYNNYCFNYNTNRIQPFLINGINTNLYNSSIIKSKLKLQSDDLINKNPLKDILVKTQRILLKPTTEQKNILLLWMDSWIVMYNKVLSVIKNERKEQSIKLNKPLKYNEINLDNLKLGILKKDLQSFKDNLNNKTGIDKHVLDNCIDTVLSMLRSSITNLNQGNCKKSKLRYIKKTKKNKMFKIEYHSLREHSFCTSKFGNLIKTVPKVNFKHVNDRITTIQYKNNKFYMLARKEVKINKNKIKKQKIISLDAGHKTFLTGLSNNHIIEIGNKIDKKIKKKLLKIDNIKKNKIENKKKYLLKHEKDLSNYINNLHWQTANYLTKNYNHILLGNYSTKGMVESKNSQRMNKRIGSSIKFYQFRTKLKYKCLTRGCKFGLIDEYNTTKACSNCGILNNIGSSREYKCKNCLSLYNRDINSTKNILLRSIIE

SEQ ID NO: 441 - protein, 458 aa, synthetic construct
  REGION 1..458: note = Synthetic
MTKKKKKFKKKKIFYKKYHKFNWLSRLFNDNQFSDLSSYIFFHGDHFWKHKYNLPFKSQLSFSWFDFHKSIQISPANPIMPSDARFVDKTKFNAKKTESFVLHPNPLQKKILLTWIDAFTDMMNETIKFQKNRLFHKKQLILDSRKLRDHNLKTIKNKIIARTGVNSHVMDQAIKLICEMYDSSIANIRNHKRPFRIRYIKKNKNKRILKMEKILISKNGKTFCSSVFGKFLDNRLSNVTSDFTIQYDKLKDRFMLFYTKNANKIKTNKKDQMGLDPGIRTFLTGYSNNHAIKIANNAHDRISDIHKKIDEIRGSNLSKRRKIKALEKRESKIENLVKDLHWKTAKYLTDNYGEIIIGNFSTKKMGEQEGMNKMVKRVGNSLSLYKFKQKLQYKCLLKNVKYKEVDENHTSKLCSNCGVEYKWNLQGKKIYDCNYCGLEMDRDINGAKNIMIKSIIRK

SEQ ID NO: 442 - protein, 432 aa, synthetic construct
  REGION 1..432: note = Synthetic
MRRVDKIINDPEYKALLNNYWNYGINWWKPVDVQLLKIKNDSWFNIKKSEDTTDNLRFNLDTKKVTNFEPIKSIKIALFPNREQKSILLKWMDTYIDMQNEVNRFSKNLLFRKKKLILNWRDLRDTHLKNIKNKIKNKTNINAHCLDKAIKEMCGKYKSAISNLGNTKFRMRYIKKTKKVKTIKFEKISIAKDKKSFCPAVFGKIFETNDNYLTNVSSDFTIQYNYNSDRFFLYYVTDVTVKVSKKNKQIGLDPGIRTFLTGYSNNHCLKIGDNLYDTIKGHIKKINEINKTELKPSIKKKIERKQYSKITNKVDDLHWKTIKYLTDNYKDISLGNMSTKQICSGFLNPYVKRVGTSMRLYVFKERLKYKCFVCGVNYQEVNERHTSRYCSNCGNGYNFRLTTEKEYGCRTCKIKIDRDINGAKNITIKGTK

SEQ ID NO: 443 - protein, 499 aa, synthetic construct
  REGION 1..499: note = Synthetic
MKKKKKKFGISDKILNKFEKIIKRNNKVIDTDTDIDIDGNEDKYDILFKKILVNTNNLWFPDKKNKLDDKISNNNGKNGTQYTSHSWFNITEYTSNLENSNYDAKISSPEVDELVKCQKIKMYPNQLQKELLLNWMKSYITMYNETLKIFKKFRFNKEKTLLNWKKLRTKYLKGIKNDIINKSQLEKGIPIIDNKPINTKVNGHILDFAIQDACSKLKSCITNVRNGNIKHFRMRYIKQTKKTMILKIEKSFINAKKNTFCSTIFKDSFKFQDNFQLKDINCDFIIHYNRKIDEFQLLNPIKIQQVNDNIPNNSCSLDPGIKTFLTLFSNNMCAKIGDNLKDKIIKYHYQIERMDRANKRERIKEKIRRKYHKKIENAIDDLHWKTINYLTKNFNNILIGNLSTKGIIKNKLNNELDKKTKIVAQFMSLYKFKQRLEYKCQVKKIGYEEIDEAYTTKACTKCGYKNEVGKKRYIKCAFCKLSIDRDFNGARNIMLRGTN

SEQ ID NO: 444 - protein, 493 aa, synthetic construct
  REGION 1..493: note = Synthetic
MVYIKNRIPIHYPNKNCGLPNWVPSINNYYDCLNTNSWFDMNICKNPNKSSVKRHLIDAPIVPNESYKQQMKSIKRCKSNKEPVFIYTRKIRIYPTDDQKCILEEWFWAATRMYNITVKYIRDFLFKDHKLTCPFASKDILINFPFRTVLKEDRDKLMKSMKNPIVGHLLDEIIAQVVSNYKAAISNILVGNIKKFKISTWKYIREKYILKIEKNLFSNGTFCSRTFKELKSSEPLINIQHTCTLQYNRDIGKYILLVPTHKETKSYVTNDLDCGIDLGVRTFATVYSRNNVVTIGNKFKKIDSCHKKIDKINELLDSDNNKCKLRKAKRKYYRRIKDIITDMHYKSAYYLVTNYDNIHIGKLSTKGILSKNNKKISRHTKRMVGVLSPYLFRQRLNHMAHKYGATVFEVNEYLTTKTCSNCGKINELEAKKVHKCKCGMKTDRDVNAAKNILKVGYQYNSTLHQVNDIDIIETDNHIVTFNKVIKEYEVFEV

SEQ ID NO: 445 - protein, 287 aa, synthetic construct
  REGION 1..287: note = Synthetic
KYILKIESSRFSNGTFCSRTFKELKSSEPLINIQHTCTLQYNRDTGKYILLVPTHKESKSYVANDLDCGIDLGVRTFATVYSRNNVVTIGNKFKKIDSCHKKIDKINELLDSNNNKYKLRKSKRKYYRRIKNIITDMHYKSAYYLATNYDNIHIGKLSTKGILSKNNKKISRHTKRMVGVLSPYLFRQRLNHMAHKYGATVFEVNEYLTTKTCSNCGKINELGAKKVHKCKCGMETDRDVNAAKNILKVGYQYNSTLHQVNDIDIFETNNHMVTFNKVIQEYEVFEV

SEQ ID NO: 446 - protein, 701 aa, synthetic construct
  REGION 1..701: note = Synthetic
MSKTARPKIIKNKPVKVTNDKPTKIFKDPNLSPIFSSNDDCQLTNWIPPVIRHNSFIPSCSWFDTKMYYRNDPIDVPFVNVSIPIIPPDSLKQQNISIGKKKARIKKIQESKLETDEPPVKTKKTRIKKIQEDDLETDELPVKAKKTPIKKIQEDDLETDALFVKIKNPDKLTPAFITTEKIKIYPTHHQLLILDSWLDGCTDMFNIAIKFIENKIYERDDEFDHVLDKHDHKILIPNISKTLTIENIRPFLLARRNIIVNSMKTPIKIHIIDEAIRQAIACFKSSITSTEKVLEWQKKYIEENPNRPEPVTPTFRIRPLKHSRPRRVLKLESDFFKTPGTFCPTVFDKFKSSKEITNFDSTVTLLHDRASKKYMLLVPIRNKIKDNCKIIHDAVGIDLGVRTFITAYSQNYTLSICNSARQWKLQNCIKKIDRIKRLISLKRNAATLRSLMSKKKSLIDLISKTESKTKRAELKHKGLKIVEEIESKKKDREKSLEILVIKEEINERRRFDKNITPLYKRIKDAKKGVLEKALLKYEVKKQNLAKDMHYKAANILVKGCDRIYIGNLSTKKIVSRSNITIRKSTKKTILALAPYKFKQILMHMGYKYGCVVKEVSEYLTTKTCSNCGNMYEIGSSKVYKCKKCKMESDRDENSAKTHLKLGLEKEILAEANSRPRKRQVIRQDQKRGNSLRTSNVSQKKK

SEQ ID NO: 447 - protein, 492 aa, synthetic construct
  REGION 1..492: note = Synthetic
MVQQKKYDISPIYVPNKELNLTDWLPPISRNTTKIKTNSWFTIEKCSNKNSNTIKKYSKITPIIPPESIKQQNKSIRLIKARNPKSTKKPEFICSKKVRIYPLNGQHLVLQNWFDLFTKMYNITTEYIRSLIYKGSKLITIREARKVLNFNAVRKILYNQKITLASSYKNNIPVHILDEAIKLSISNHKTCLTNLAEKNIKKFRVRCWPKNHNKKILIIEANFFKESTFCSTTFDNIVSSELFNDIDRTVILQYNQDTRKYILMVQHSIKEKTLKKNKLSCGGDLGVRSFLTVYSEDHTLNICPDIKLNKDIVKWHKKIDKIHKIMNFSNPNQKIMVGTKINGNKVHYIKNKRVRRSKLRRALRKYHKKINNKVRNMHFKVSHHLVNSFDNINIGKFNTKQILSRHNQKITPTTKRMIGVLQPYRFRQVLKYMGNKYATTVTEESEYLTTKTCSHCGKVNEIGASETYYCPKCKLETGRDENAAKNILKSRI

SEQ ID NO: 448 - protein, 423 aa, synthetic construct
  REGION 1..423: note = Synthetic
MYHIQRPIFYHNKIVTSTKVTEWLPTQSRTYSSHQTQSWFYASEFNETFQHIISPTHEQRVILSEWFNAFIEMYNKTIDYIQKLFDCQEKYLFSEQILNFCKLRYHLSDVQNYILAGMTNIIPPALLVEAIRRAVQSCKDRIARFNKTGKKIRLRKISHAKKRKVLVIPNRFLNDTTFCHRIFESTTILNDVTQAIILQYETQLGEYKLIIPGKKDDHISCASCDKVATECGVDPGCRTFMTTFSNDDVYLIGTKITKRLEEYYIKIHEILNHLHNSAMTIIERNEMKRICQKYYNMVANMVDDLHYKTAYLMVTKYDNIYLGKFRPMEILAQKNNLSDQARWILRVLDHDTFRIRLNQLADKYGAKVYEVDEYLTTKTCSGCGNIADVHGEIYECDRCKIRTYRDVNAAKNILKIGKQMNKN

SEQ ID NO: 449 - protein, 462 aa, synthetic construct
  REGION 1..462: note = Synthetic
MNGSIYYPNTDISLTQWLPSLTKPYIDLPTNAWFHSVRQNNPKPKSFDHYIIAAPVIPDESYKQQLAAIRNFKQDRVPEFITTSKIRIFPNFNQRIILDEWFRVHIQMYNKTVEYVNSQIFVNKKIDLALAKKIASFRKLRPLLKVFRSNIIQNMEDKIPVHILDEAIKLAVANFKSCITKMENFSIKKFRVRNISYNKKQKILIIESNLFNGTTFCSRTFKTMKSSKPLDDIDRTVTLQFDARTGKYILLVPITTPEKQSIAKKIDCGADPGGRTFMTLYSNNNTYSIGTGINECLKKYYKKITKIQDLLQNYVLTSKKRSRLKKGLNKYHLMITNMVKDLHYKTALLMVIKFDNIYIGKLSTSQVLSKRNRLPKKAKWNLQMLSHYLFRTRLIHMGHKYGAKVYEVNEYLTSKTCSNCGNIKNVQGEIYECDRCKIKTGRDENAAKNILKVGYVESERKS

SEQ ID NO: 450 - protein, 516 aa, synthetic construct
  REGION 1..516: note = Synthetic
MATKKKKKKKNTIFVSNEDVGVPEWVPSIKKNNNKSIDTNSWFKMNFNKNPNQIKLTKRKIIFPTIPKESYKQQKATINRTKSGKTPGFIYTIKNRIYPTISQQLVLQEWFNAFIKMYNITVNFVNHGMYINKKIDLTIASKLCNFILLRELLYEEKEKIKQSLKYTIYTHLLDEAIKHAVSNFKGCITKFEKGNIKKFRVREMSYNKSRKILIIEPSFFGKSNSFHETLGTIFSTIFGKETMESEYSLEGINKTTTLQFNTHTKKYILLVPKIMEPNEKLINKIDCGGDGGGRTFFTFYSKNGTHSIGTNMNSELKPIHKKIERIQKKLYPKKEPINDNPIGNISMEDKMAKRKKKRKLKKALEKHRTFLKNKVKDMHYKVAYFLVNNFDNIYIGKLNTSQILRKSNKLPKNAKKIIKSLKHYAFRSILSHMGHKYGATVYLVSEYLTTQTCSNCGVLNHVGDSEIFHCKSCKMKTGRDENSAKNHLKIGYEDGTYIYNNRICKKVKLLTEINGI

SEQ ID NO: 451 - protein, 527 aa, synthetic construct
  REGION 1..527: note = Synthetic
MKEAVKTVKPKVPAKKRIVTGSKTKKKVFVKKKPPAKKPPDKKPLKKTTKKTVKKVINRPKSIHIPNKDLKIFKWIPTPKKEFTEIETNSWYEHRKFENPNGSPIQSYNKIVPVVPPESIKQQNLANKRRKTNKPIVFISSEKIRIYPTKEQQKILQTWFRLFACMYNSSIDYINSKKVVLESGRINVAATRKVCNKISVRKALKTIRDNLIQSTNPSIMTHIMDEAIGLACSNYKTCLTNYIEGQIKKFDIKPWSISKRRKIIVIEPGYFKGNSFCPTVFPKMKSSKPLIMIDKTVTLQYDSDTRKYILFVPRVTPKYSVNKEKNSCGIDPGLRDFLTVYSENETQSICPIETVINTTKNEYNKIDKINEIIKTKPNLNSKRKKKLKRGLRKYHGKVTNKMKDMHYKVSHELVHTFDKIYIGKLNVKSILSKANTVLKSALKRKLATLSFYRFTQRLTHMGYKYGTEVVNVNEYLTTKTCSNCGKIKDLGASKIYECESCGMYADRDENAAKNILKVGLKPWYKQK

SEQ ID NO: 452 - protein, 238 aa, synthetic construct
  REGION 1..238: note = Synthetic
MIDKTVTLQYDSDTRKYILFVPRVTPKYSVNKEKNSCGIDPGLRDFLTVYSENETQSICPIEIVVNTTKNEYKKIDKINEIIKTKPNLNSKRKKKLNRGLRKYHRRVTNKMKDMHYKVSHELVNTFDKICIGKLNVKSILSKANTVLKSALKRKLATLSFYRFTQRLTHMGYKYGTEVVNVNEYLTTKTCSNCGKIKDLGASKIYECESCGMYADRDENAAKNILKVGLKPWVQTKIV

SEQ ID NO: 453 - protein, 482 aa, synthetic construct
  REGION 1..482: note = Synthetic
MVYNQDLSISNKTCGISDWLPPIRNKKTSDIKSNSWFDIRRCLNPNIKTKFVPVNNKQIVLKEPNCIYLKYDLITLNPSSDHIRILREWFSMYAKIYNHAINLIRKMFYVNNKLIKSKLQHEIYDEIIVRKLSNDKTKLNESLKLSDRPPEFLLDYAISHACTYCNSQVKKYLKDSKNPYNKKTLRFRLWSLHKSRRVMHIFPPKLCDKAVCNGLFLKLNPSKNIHDIYMFCVMSWDRLTGKFFVYKPVLKRLYNIPKKQFMRCGIDPGVRTFLTLYSSERTYDVCDSTFYNNKIKRMWRKIDRINFLLHNRKKRKKRKNDRRLRKSLAKYYRKIRQRIKDLHTKTAKYLVSRYKEIYIGIYDTSKNLSDPRISFYEKRRIATLNHELFLTRLQQVADRFGSSVFAINEHMTTKTCSKCGRINEIGSSKVHKCACGMYAGRDENAAKNILKKGIKEHYLSAQSDKNVTEYNNKKSNKTNKET

SEQ ID NO: 454 - protein, 523 aa, synthetic construct
  REGION 1..523: note = Synthetic
MAINANSWIPTINSPYNSVNSHSWFDIHKIKNFDANDPITYNINNNDEFIRSYTIQLFPNANQINKLNDWFILFIIMYNTTIEFLRPHIAPNGYFINDDVMIDHCTNFKIVRNYLLEESHHAMMDFVHRRGWFTPALWAGERDIIAGNSRIPKHTPLRGICPPEQNKTSFCFVLSGHTLDEAIKHAVAKFVSKKTFINNYINKQRFIYQQRGLNFENFVEPDFLRRFDIQPWDTDDVNQNKIIIFESLAFSKTQNSIQQSALGIMNSDSSICKMPVTCTLIYDTKKKSYKLHVPITFNDKKGRNMISSFNDFDPIYQRIKYAQDGLINISKRRASVGIDPGVRTFMTTYSRYEVYEYCNKPNKILEKYYKKIDSAKRKYGAGLIGIKRMKKYTENGEKKIKNYIKDMHYKIAKHLVTKYDKIYLGKFNSRSAAQGRLRRRTKRIMNSLGHYKFRNILINQGKKYGSKVTLVSEYRTSKTCSSCRELNEIGGSRIYNCQNCGMIAGRDINAAKNIYKRGKGESP

SEQ ID NO: 455 - protein, 576 aa, synthetic construct
  REGION 1..576: note = Synthetic
MSSKSSKSSKSSKSCKSSKSSKSSKSSKSSKSSKSSKSDKKKKKEVVNYNDHSLFPPIALHDGTAYEFKTLILFLETNDDDNSSNNNTTTRINSNTTISSDNFVVKKSEKSIEDYYNKPWSLPIPPNSDVNVHDWIPQKSDIPDDNKIDDICYQYINNPDINSIDNLSYNIDVNNSNLQKIERIRIYPNKKQKNILHSWFDQYTEMYNITINYLIKNLFTKTYKKHDYKFFDYEKYYKEYTLYNVKKCLKPKKNNIIANNVHKIYSHILDEAIRQAFSSLLGNITSIRRGKKFKFRMRKLEYDRKRLSIKIEKNLFSYFGGGLIGNGLEKIKFKAPDGRLDLNIESTITLQYDSESEKYIIFHPIAVKNVNMKKYDLACGIDPGLYGFATIYSNAKVTTVGQNLARKIEVKLNRIDVLNKAINERELNGKKLNSKKVYQLKRKVKKISVQITNKVTDVQWKLAKYLTDTFDKIYIGKLSTLRVVSNKVFGLTDMQKRIILRMSHYGFREKLKYMCKRTGTLYKEVNEYLTSKTCSNCGQINEIGRMKKYECPGCTKWLLRDVNAAKNILKRGLLKS

SEQ ID NO: 456 - protein, 407 aa, synthetic construct
  REGION 1..407: note = Synthetic
MPDLFYPTLLQSSNIKSNSWFDIKGYKNKKRRKKKTTFESNYIDTIKIKLSPNEKQKEILKLWLNDCIDVYNHTNTYIKNNINNDKFGKIVNFINIRKNLKDYLRNICLINNVNKHTIDYSIKHCVEMYKSAESNKNNNNIKDYEIKDLDKDRRRKNLVIEPSSVSKKKNAIFIKQLGEMKSSHKLDIIKRNSILQFDRIKKTYHIIVPINKSEKININRYSKCGIDIGVRTFLTVYSPEETYEIGTNTNKIIDKYNKRLDKIKSNENKMSKEKYERLYYKYSDKLRNKINDMHNKSASFLIKKFDTINIGKVSTKKMVSNLKGNLHDIVKRRLMALSHYRFRMKLHTMSKKYNCNIIEIDEYMTSKKCSKCQNIKGDLKAEKTYECIKCNLKIDRDINASINIYKL

SEQ ID NO: 457 - protein, 444 aa, synthetic construct
  REGION 1..444: note = Synthetic
MSFYPTLLQSSNNLKSYSWFDIKKIENVNCKRTKCVKNITSEGYKTTIININPTDNQKNILKKWFDGHTEMYNVTNSYMKEKIRQYYKELNQDKVLTGIFSYDKKNKKWSFNFKAVRKFLDEQKRIIVKQYNMNVHTVDYAIKHCVDMYNASHALHNGNMKRFCLKNLTFNRRRLKLTLEKQSFNKNYTGFCVKTLGLMKSNISMECCYKQTELQYDTLKKTYKLSVSHKYDKQRKINRFDTKVGIDPGIRTFLTTYSENCSYQIGDKTNQIIDKYIKKKDLMNRIINMKKEERGKKNVCNLRKAKIKYQIKMENLIKDLHNRVARFLAIRYETIILGKLSIKSIVSKKNTHLPRIVKRRLLVLSHHKFRMKLDTMSKKFGTNLVLISECLTSRNCSGCGNTKQKDELGGSKVYRCSKCKLIIDRDINAAINIYSNKPMIDTTK

SEQ ID NO: 458 - protein, 298 aa, synthetic construct
  REGION 1..298: note = Synthetic
MYKSAVTNYEQHNITGFNVKDLTKNRRRKNLVVEPSYFSKKENGFCIKALGKMESDIKLREVVSKNCILQYDCLKKELYLITPNDYDIKTELHKTKECGIDPGIRTFLTVYSENETYEIGTNLMGKIDKYLEKKDKLISLKDTKKITENKYNKISVKIYERMRNRINDMHHKISRKLLEEYEKIRIGKLSTKSIISNLTGNLDEKSKRRLNVLSHYRFREILKMKAVGYKTEIEEVDEYKTSKTCHKCNKYKEDLGANKTYKCEGCKIEIDRDVNAAINIKNGGLRTVLPPKNKVDIS

SEQ ID NO: 459 - protein, 282 aa, synthetic construct
  REGION 1..282: note = Synthetic
MFKSCYTNYTEGNINSFNVKSLSSERRRQYIVLEPQNFKNNSFAFKTMKEIESSKEINDMKIKHNVILQYDKVNKTYFLLVPTDIKINENLKRNKKCGINVGYRTFIALISENKCIEIGSNICNHIYKRNKRIDKLNSLKDTNKIKNRQYKSKTNKLRSKLANKIEDLHKKTANFLFKNFETINIGKLSTKSMVSNLTGNIKEITKRRLFALKHYKFRDYLKLNCKKYNTKVNEVSEYMTSKTCSSCKNIKKDLGANKVYNCDKCKLVIDRDINASINILKI

SEQ ID NO: 460 - protein, 454 aa, synthetic construct
  REGION 1..454: note = Synthetic
MKKSENFWFPDLKQEKKSIESNSWFDILKCENPVKNVNDEYIDICKGTVVRSRKIFIYPNDEQKKTLQKWFNDYIDIYNKTNEFIKSKIFKDDEIVDENLKFVNFRDIRDKQMKEYKEELVKNTKINKHLLDEAIKNNVAMYKSCISNKKNKNIKTFRVRPLSKEKRRKNLHIETNLISKIEKNNSFCSSILGDMKTEDDFKLKNIKHTFILQYDKYYNKYYILVPFDIKKVDNISDIKNKVPTTNKERRRYLKLSKNNKGNRIKTKSKCAIDPGIRTAYTLYSKNETLEIGNKIKSTLKPFFNKIDNTNSTKDTNKISEKKYNKCITRIYTKMHNKIKDMHWKTSNYLCKHFSTICIGKISTSNIVNNEKSNIKEITKRELYALSHYKFRQILEHQCEKFNCEYKEINEYETSKRCHKCNKINNVGSSKIYTCDVCKISLDRDVNASINIYKK

SEQ ID NO: 461 - protein, 418 aa, synthetic construct
  REGION 1..418: note = Synthetic
MKKRKKNWFEDYNKNQLNTNSWFDINIINNENFVNNTNNIKPINKFLKCKIIKIEPNNIQKDILLKWMDSFIDMYNSTNYFLNHHLYNFNERKVITENKKEYLNFRNLRSKYLKNIKNNYCVNKINKHILDQSINHCVAKHKSSITNFFNGNNKFFRLRNMKKNRRKKILILENGLFSKNKNGFCISVLKEIKSSIPLDFITKTSILQYDKHLRQFNLYVPIGDNSINLENRTKCGIDPGIRTFLTCYSENKILEIGNNCYEKYKKYYEKIDKINNLYSTKKLNKQKQSKALNKNYDKIKNLTKDLHYKSCKLLTNYFDNIQIGKISTRSIVSNEKNLNKISKRAMLSLSHFLFRERLQFQSLKRNVSFKCVNEYNTSKMCSSCKNLYNVGQSKLYCCSNCNLIIDRDINASINIYNK

SEQ ID NO: 462 - protein, 420 aa, synthetic construct
  REGION 1..420: note = Synthetic
MKKKKKEKWIPKLSDHYNEIETESWFDIREYQKNPNYHSSMVCFSDRIFIRAEKIILYPNKKQVNILQKWFNLSRKMYNKTTDFLNKKIFINKKISQINVKKYVNFRKLRSNYLKEAKESLCLNNINKHILDQSIARCVAMYKSSLTKIKKKQIKDFRVRKIKKDKRYKTLLIEGCLFSKVKNGFCISVLGEIPSNESLENISETCILSYDKYNSKYTLSVPKYIEPKEYETRNLICGIDPGVRTFLTVYSKEDVYQIGNDIDFNKYFYKIDRLNQICDSKESKQTRKYKRAIGKVYDKINNKVKDMHFKVAKFLCTRYKILKIGNLSTSKIVSNETSVLKESTKRLLYSLSHYKFREKLINQAEKYGVNIKIVSEYLTTKKCSKCEKKNEVGKNKIYKCGKCNLKVDRDINAAKNIRYV

SEQ ID NO: 463 - protein, 417 aa, synthetic construct
  REGION 1..417: note = Synthetic
MKKYKYVGNKEYWYPNLRSLERTDTITGNSLTVSIYEDNKSYKIPNRPKKEKVSYQNSPSDCKTKSIKLQLDNDGQKLLSNWSYVYLKAYNIARQYDIEFPQEWTGVKNAWKNKVMKYLSENYLSYAASILRDKHSIALSICEYHKNKKSALSNLKGKNITHFNLRSKPLSKKIVVMEFEKTSANSRNPIGQVVYNFHHLINKQFAIQFNRYNRTANLLIRVSIEQLEEPNREYTPVSVDLGLRTFASCYDFNRYICVGNNNSKLNNLISLANNKQTNFSSKKAERRYRKKRFKKIKNIVKDIHYKTAHFLCSNYSEVYIGDFKSKACKEVGNNKSIKQRLNQYSFYKFKDTLDYIAIKYNTKVSRWNEYLSSRSCSWCGYDNKLLGSNEIYKCPKCKKQTYRDCNAARNGMIRVLS

SEQ ID NO: 464 - protein, 824 aa, synthetic construct
  REGION 1..824: note = Synthetic
MNFRKTLQKCKEKLQNNIINQNDSIWMPLDVRVCDNYHFKTDSFNLIVKYDSEHLEHNNTFHFNNYEHLQAKIVNVFFDKVQKSIIKTWMKLYKYTYDTVIQIFSHVYNLCNIYYKINFYDARKILTNFISYNCKNNYKFNYFYKLNKHTIRKFYFYRNNKLCNKEIKILKKQFTKIKFNNIYNSDNYINLFKILKEYRSEYVKYVKFYSANPIHFLNKLHFTDFYNKLQDEYKQLFINLKCPIEEIILQEKNINIPIFKYDDYNPYMKKYTDFIKNRDNINNYEEHNKIYRLYVNYENKLINKQKRLLEIRSKLIYTKLSVIVKLIDNVINTFYKHIYKIIEEKLPQQVNNFVDQVKLYKTNEQFRNKKNAILQKYGYKTTINYKNTINEMRKSSVGKKIIINEKKLLYKDIIKTNHVSIFEPKYTNSLRNNTNVSRHTIDLAVEKACANYKTCLTNLKNRNIDNFNLREIKLRKMIIDIEPNEFSKEGIRKNILGTTTGFYNGILFDFTTINKATILKYNEKLNKYTLHVPYINKNLSEDEKKEKIKILEKKLKMTKKQKKRNKRRRKEKIKKRNNKNKKKETIKNIKKEIKRIKKNNMEKTGEGTISLDPGVRKYLTGYSSEKKKNIEIRENIKIKKNCYKIYETTKKYGLSSGKKKKVKKKEKKEKKEKKVKREIKVISEKEKEKVKRKLENRSKKVYRQMTDFHNKVIKYLTENYASILIGDMSLKGILNKKTSKLKKKTKYLCTRLRIGMLRTKLKKKCEEKNLKYKLVNEAYTSKTCTKCGTINENLKSKETFNCNECKIIIDRDLNGARNIHLASL

SEQ ID NO: 465 - protein, 391 aa, synthetic construct
  REGION 1..391: note = Synthetic
MIKKKNLDIKKFPKSRLKKIVKGISNEISETVLRCKKIIIKFSKIQRKIIRKWIDIYRWIYNFTIKYTRTSKMKSFYTLRKEIKESFTYGQKEYIYQMPSHILDQAINDVVKSYKTCMSNKKEGNIKRFRLRYKKKISNIQTICIPSEYFSKNKNSFVYSKLGIINSSESIKNIKQTCRLTWNKKNNIFILNIPVEKEKYKVGNREEICSIDPGIRTFQTLYSKKYISEFGKDIYKEIGTKIDKIENKKENEGTKWYRKYSTRLYDKIKHKIEDLHWKTSLDLVKSFDTILVGNMSTQRICQGNLNKKVKCIANMFSHYKFNLRLQQKAEQYGAKIIMVNEAYTSKTCGKCLKRNEKLGGNKKFKCPSCGFTWDRDYNGARNIMMRYFGIF

SEQ ID NO: 466 - protein, 406 aa, synthetic construct
  REGION 1..406: note = Synthetic
MREELGNLIKGIPNSRVLYPFCGEGTVDLNCRIKSEPDWLGDTIIRCKKVVLHLEDHQRNIIEGWFEVYRQVYNFTLKCIKGKEKVSFYDLRKEVKGKFPKGLVNLVKKSKIPANTVDGAINDVVKARKIAISNILVGNIKHFRLRPKKISKKVNTIVLESNAFSDKCDSFCTRALGKKIRSTDIIQGIDKTCRLTWKKGYINPFILHVPEDRPKLIVKNKREMCSLDPGIRTFQTLYDTERYVEIGKRAAKKLEHHLDRIHKNKEHQKEKWYKKLSNRLYDKIKHTIDDLHYKTANFLCRSYKKIFIGDMSTKGIVRTGGNLNGSTKDLTHILSHYTFRMRLIEKAEQYNSEVIVVDEAYTSKTCGGCGKINENLGGAKRFNCSCGINCDRDLNGARNIMIKGLY

SEQ ID NO: 467 - protein, 359 aa, synthetic construct
  REGION 1..359: note = Synthetic
MLRKYFRDTKFECPPSYITFRKYITTRLPAELKRELKTSGIPAHSFANSIHDVLKNWKSSSALKKKKHIKDFLIRYQKYNKNKFSIVLESSVFSKDNKRISPTVLKGYIKSVGDQFHKTRVQITKNLKTGLKDHECRLCWDKRTGYITLYVPMEKPEYEMIYRESWCSLDPGLRVPYTLYSPISSADLGTSDRDKIKSLLDRIESRKRFKDAKWFPKFQSHYMKKIADIRDNMHWSISNMLVKSYDKILIGSMSTKSICKRGGNLTANMKQLAYSLSNSEFKNRLASKAAEYGSEMIVVNEYLTSKTCGGCSKTHNVGSSKQFNCPRCPYRADRDLNGARNIALNYFGLFKPIIRHTVR

SEQ ID NO: 468 - protein, 415 aa, synthetic construct
  REGION 1..415: note = Synthetic
MKIIKKSLIQNSQAWKPSLYEGVLVKSNSWFSIRKKQNCRFNLPPKLITTDNIRCKKIHIKPTIKQGNILLTWFELARIAYNISIKNLRKNNRTTFREMRNIVKQEMRNNLYTNGLIKNSEVYQQTLDNAVKDVFKARKTAISNIKAKNIKFFRLRYKKKSHHIKNMVLETDAIHKSGNGLKKRDLQNLRPSESIKNTKILRIGYNTRTHKFVIYMPYDKQTNKQVKRNKICALDPGIRTFQTLYSPSGITYQFGDEKNIIRKNIDRIENVKNFKLKSWYKKYVSRLREKLKNRIADLHWKVSSFLCKNFDTILVGNMSTKGIVSNRLHLHSKTKQMTYTLSHYMFKERLSSKVIEYNCSFKVVDESYTSKTCGKCGELNQSLGGSKQFNCPRYMCLYRMDRDIHGARNIYIKNC

SEQ ID NO: 469 - protein, 393 aa, synthetic construct
  REGION 1..393: note = Synthetic
MLSKFPIDVSKLTTRRRVKIVTKESTLTTCRKIQLYPSRTQRVLLNRWRLGYNRIYNYTLGYIRWNKQVGYRFFTVLSIIMKEPRYKRLIALYDLPLVFGHEAVKECCKAFKIAFANLRKRNITHFKIRYKRTTSKTIVVQGNCFSKRKNGFCIRKLGEMRSSTPIVGSKESKLTVEGGRTYLYVPVQTPTFEVVGSRKECALDPGVRTFQTMYCTRGTKEYGKRVSDKIAKVHKKLKTLDSRKGTSNSRDRVRWYEKARNKVYATLKSSIKQLHWSTALHLVKQFDTIYIGSFCTNSKRCVSRKGKLAKVTRFATNALSHFTFLQRLRYKAEQYGKKVVVVDESYTSKTCGRCFELNDVGSSKIYNCSNCNLTIDRDVNGARNIMLRAKGLW

SEQ ID NO: 470 - protein, 468 aa, synthetic construct
  REGION 1..468: note = Synthetic
MRIKRTNNKQFFRKKIADLLPNNAKYKTINKSINNTWFNSKFTKSKSDNTPLFPIMNNDDNDNTPLLRVRKVEILFTNPQKNIINEWLQLYKYIYNVTVKYIRLNPNVSKTFYTLRPIIKNSLNSSIKLRIKKSKIPSHTIDNAINDVTKAYKTSFALLKNKRINHFLVRYKKNNSKESLTLESSCFPSYVLLKKKEKQDKITDIDERNNLQDIDLNTAPNTFCPSIFGKEIKSVEAINQIFHDCKLSYHKGTDKYFIFIPIERNREISQNQDTAILDPGMRTFQTCYSKNNIIDYGNNVSIEIKKQLKKADKYNKKESYNRRVYYRTLNHIQNLTNELHHKVSNDLCKRYNCVIIGRLSTIGTNNKKTSCLTKMTKRILQNLSHFRFREILKAKCEERGVKYFEVNEDYTSKTCSHCGNYKKDLGGVKTYKCKKCKITLDRDQNGCRNIFIKNYTSIKEDLIKKGYM

SEQ ID NO: 471 - protein, 426 aa, synthetic construct
  REGION 1..426: note = Synthetic
MTNTYIWKKNNKLWLPKEKDKFTIENKNLSWFDCNVKLYKKSNKVKILDHSENLLRAKKIKLYFTPEQRKKIISIIGTCRYVYNLTLKFIRTHDVNIHKYNFIKLRKLITSILPIWTHSTPKHILDQQINDICKAYKTSFALLKNKQINHFDVKNKSNKYPKETICIESCCFSKNQNTFCTTLLGNNIKSSESFIGTLKDSRLTWNKRLNEFYLFVPIDKELQQSATSKYKFIALDPGCRTFQTGFSNGHVVEIGTDVKSKITKINKEIDIITSKQSQSKTIKKKYNRAYFLKQKKKENLINELHWKTINFLCKNYNEIVIGDMSTAGVSCNLTSKLNKSTKRELYGMEHYKFRTRLQEKCVEHGCKFNIIPESYTSKTCTNCGNIKNDLGGNKIYKCSKCGMVLDRDVNGARNIYIKHTTLVSAL

SEQ ID NO: 472 - protein, 417 aa, synthetic construct
  REGION 1..417: note = Synthetic
MILSKYANVKYPKNILTKYPINEYTSIHSNTCWFNNTHHLSSKLQVPKLIDTDKKVTKCRKIEVTFTPNQRNIMQQWFKLYKSVYNIAIHQANKNGLYNFIKLRALVKPMYKTLYEGEIKNCQIPIHTLDNAIRDVCKAYVSARGNLCAGNITHFNLRPKRKCNNKETIVIEGSSFSKVKNGFAIRVLDTVKTSESILGYKRDTRLTFDKRNNKYYMFIVIDTLKQIKLHCDTECALDPGLRTFQTSYDKKNYLDLGVNTMDQIKPILIKIDKVTKFKGKKWHKRYTRRLRLKISNMVDDLHWQTANFLTKRYNEITIGKLSTSIVSKKGNMSPMNKRLYYALSHFTFRQRLKHKCNERNVKYKEQCESYTTKKCGKCGKLNEVGIAKIFNCIYCKFSCGRDLNGARNIMIRKDLRL

SEQ ID NO: 473 - protein, 414 aa, synthetic construct
  REGION 1..414: note = Synthetic
MQFNTDFHSVLKSAKLWRPDRVQNFIDLQTDSWFNINENYTDSDKHFELDGNPDNIINVIRSRKILLYPTNTQRKKLLSWMESYRLVYNKTIDYAQENKVKSWKMARNAIKKIIPNSWKTNDIPIHTLDNAIHDVYKALKTLITQKKFSWQNYKKFPLRYKKIGNPRKIVKLEAQSFSKKTRNTIGNGIGKIKCSEDFIKIKKDSIIQYNCHTKEFYLFMPFVRQTQGCTGHATCSLDPGLRTFLTGYVTGRNNHIVNICENPMKKVEKKIELLDKLKENKVWRKYHKTQKKLNNIIDDMHWKACNYLCSNYKTIVIGMMSTKSIVRGNKLTPNQKKLAYILSHYTFRMRLKSKCEEFGVRFIETEESYTSKTCSECGNKKEDLGSNKIYNCVECNNIFDRDVNGARNILIKVM

SEQ ID NO: 474 - protein, 364 aa, synthetic construct
  REGION 1..364: note = Synthetic
MLLSPKEQKIFSVWFYVCDYYYNLGIKYYKKNKGINLSSFTFRDLIKKEGNKNKEIRKQIKKFSIPSHVINDYILDVYKAYISAIKAVGSNKCKTKHFRLRYKKHDARRKTIPIPYEKNGNSNYFSRNKLWKNIKFEGNFKVSEINHDCRFQYDRLLGKYYLFVPYDKKCSNEHSNNLIALDPGVRTFLTGVTNNYDFYELNISKKLDKLLSKISKKDRLFRSDKAKTKFKRKINKKISNLVDDFQWKTCKYLCSNFNEILIGKINTISILSKKNNCLSPETKKKLQTLSHYSFRQKLKSKAEEYNNKVYEIDEAYTSMTCFNCKWKNKKLGGNKDFHCDNCGITVSRDFNAAINIREKHFKRF

SEQ ID NO: 475 - protein, 437 aa, synthetic construct
  REGION 1..437: note = Synthetic
MKTNENEKEKKIRKEKGRTASDPLLKTLKFRIFPTPEEIKLLQVGFDQYRWYYNATLNIAYKHYGFEKILNRKKYSDIELRDLVRKYKYVEKDTEHFKFIDFEYDEKRNEVPIPPWCNEILSARIPRGASSKFVSSLNSAITNFKEGNTKKPKMSFMSKKKDTEYMYFEDRSFPLWIKKIKSTYWIRTKDHKRKTISLSDLPPLRSAEIIYDKIKNQYFLHTPVQADWFHDEDRRIESQERLLESTDRIIALDPGVRKFLVGYDPQGKSVFFGEGASLILTGLLLELDKETDNTKQKRLWNTVKHYVEELHWKTASYLVNNYDIILLPEFRVQGMIQSKEMRYKKMTKRLLSMFSYYKFRMKLNFKCAQYKKKLIIVDESFTSRTCTGCQQLGERNGEEEHRCLSCGLVIDRDVAGSRNILIKNLIIQVYAGPVPIV

SEQ ID NO: 476 - protein, 608 aa, synthetic construct
  REGION 1..608: note = Synthetic
MLQQKTCISGLKKQVSSSKSRYKPSKCGSEKESSNVFEQKEVIDGSSEMISSPTSQKNKDLSSPKKISATAESLQPPKKKIWKDKLSSSDLNSLTTKLLGILDRESTLKEKVLTPFWTPQSKEMSKRLWLPTKIDCVDSVLNLSKESFPHAPMGKSWFSINKKHPQRKNSLMTSFQSSQYSLPDSMDLGAIPSKRKSEQKPLKSVKIRLFPNQEEKEQLQMMFEQFRWYYNATITIVYNHYGYEDVPKKRKYSFETVRDLLRKYKYTEEFVKNLVIQDFVYDEDRNENPQPDWWDKEPHSRVPRGAVAKFVSSLNSAISNNRAGHNKSFTMKFRSKKSPTDYLHFEDKGYPAMIKKIRSHYWFTGKDGKKTKISFSDIESMKGLEIIYEKETGKYFLHCPVSRDWFPKEDRRSDNQAKFVSQGERVIALDPGVRKFMVGYDPAGYSIFFGDGASLELTHLLYDVDKNPSHSKWKKIKNMVSELHWKTISFLMENYDTIILPDFRVSQMIRKKKLARITKRLLCMFSFHSFKEKLMYKCATYRKKLCIVDESFTSCTCGVCGVINNIKGMETYTCESCGLVIDRDVSGSRNIFIKNATLRLGELGFYQV

SEQ ID NO: 477 - protein, 396 aa, synthetic construct
  REGION 1..396: note = Synthetic
MEKFRWFYDSSLTVLNLEAIRTGKKLEDNHSFSYPFLRDYIVKKYRYTEEQVDHMVFCDYVYDDENAEMMCPEWMTGIHSRLQRGAIQKLSENINSALSNKRAGNIGNFNLKMLSKKSPTEFIHFEDKSFPVAIKEIDSRFWFTDKSRKRQSISFKDVFNNTTKKGIEIIHDKTTDTYSLHYPVDVDYFPTTDRRGDNQARYEVAEENRFISLDPGVRKFMVGYDPKGKCVIFGEGANKELSSLLYKIDASEDSQMRNRLFRRIHNLVEELHWKTITYLITNYDTIILPDFRISGMVKGKKLAKITKRLLYMFSFNSFRQKLEWKCRIYNKKLVIVDESYTSKTCGGCGVLNNVGSSEKYTCKKCGFNCDRDVNGSRNIMIKNLTLRLIPDFPVSK

SEQ ID NO: 478 - protein, 538 aa, synthetic construct
  REGION 1..538: note = Synthetic
MGRSWFSIETTSHLKGDSPRMSFPYSRSSPVDSMDVEVTEIKERENLPPQKIVDKEPVTCKSLRFRLFPTAEEKEKLKQYAEQHRWTWNMCKNVLEKNNSIKSLKDRVDDEKEKMVLYRARILQCKQCLSEAMKAHSNDSTPESEDNVKQLEGQLKEIKRSNPRVKFRYETFRDQVGRYKFTAEDSQSNVVLVDFVEKEPTEKCKIELPDGWWKHHHNRVPRGAVHEFVGALNSSISNYRNSGRDFSINFKRKKNRNTIHFEDGLFPSWINEMRNRYGYTAVLPDENGRRRRRSITLKEIKKHTKVQSIRIVHEQDIDRYYLYLPVPTGFYLPDDRHRESQALLVPKEEIISLDPGVRTFAMGYTPTKTVSMGDEGAVRIFELLNEYDDLWVGKEASPEAREKASISRREKMGKIRYMIEDLHWKVIKYLVSNYKTIVYTDFRTKGMMKKLSKENKRKLQALSFFKFKQRLIYKCKTSGVDLVIINESYTSLTCGKCGHQNPKNRSKTFKCHECGWVVDRDCNGARNIMLKALGFLCP

SEQ ID NO: 479 - protein, 498 aa, synthetic construct
  REGION 1..498: note = Synthetic
MGGEVVEIKELKTKTYSITDKDPIEYKTLKFKLFPSQDEKDLLFDISNQQRSTWNACVNIFEQENSIHIIKNIIDTERKEKEIYKEKIKSIIQIKDKKLKKEKLEEVSKNKPKQENFNIDYKSFRNKIKKYKYVESPFGTTTDGQPMVLVEYQYGENNDSFPVPEYLKSKISHNRIPRGAIHNFSSSFNSCISNYRNSERDFSLRYKTKKDINQTIYFEDANYPSIINNIRNKYCYTKVIEGRKKRQFISLSEMKEHIKIKSFTIVYEKNTGQYSLNLSVPVDFLLPYDKRSENQALFKVRKSIISLDPGIRTFVAGYTLDETLMFGDGCSIKIFELLKQCDSLEILDTMTDREKDDIYNAKKLMRKRIKDMVTDLHWKVIKYLTSNFQIIIYPNFETSNMMKKLSKENRRKMSALSFYTFKQRLINKCKENNNTLFITNEAYTSRTCCSCGHLNTSSTNKVFNCKKCKYTVDRDINGSRNIMIKTLGDLYKLRKEDD

SEQ ID NO: 480 - protein, 780 aa, synthetic construct
  REGION 1..780: note = Synthetic
LGISKNRGRPIISIVRLKCYLNVGNFRIRCPLMKSTFALRKPAVACGFARILFDPGIEMEKLNVLKPKEDTVGISSLPLFNSRERKLPTSRLPDEKSAMPASVPQVKRKIWNVNWNPCEHNSLITKACRILDQASISNGKNFCPYWTISSEEISRKLFLPTGTACADSALNLSKELFEPIKGESWFCMTREQLPSRNLSRIFSQSLQFSAAGSTVYEVTHSKESLDRLEKFQGESKSGKKYKSLKVRLFPSEKEQHDKRLLADCARQRWYYNACIDIFDWEALKAQLEEAKSQRLPCPSFSANEIRNRLAWHEYLEREEVWGNKKFILKSFAFREECQQEQIAKAKLKLEKERQQAEINAANKIKRLKEKEMMKSMSREEKYKFEVHLREERERLKMLAQEKLQESKKINGNMKKNKRDYPQAQWIESCYGQKIEGKTLERIIRGACANFASNLNSAIKNYYNGHISSFNLDFRRSKSINEFLSFDDGNYPGYIKKLSGYYGYRNNNRSLACNKRRVHLNLQEIISQHTPTAINITHDKQTKEWTLHFPVERDWFPSDDRRGENQALHTVNGEAIGLDPGMRKFLTGYSTTGEILTVGNRAYKKLTPYLNRINTLACEMAQLRKRKAQLTDKQQLLEHEKIAAAKWREKFELWKRVKDMITELHWKVATYLCRNYQYIFLENLSSKSCVKGNIAPFIKRILLQYSFHKFKQRLTYMCEKYGCKLILVAPALTTKTCSNCGTINEVAKSETYNCPNCSFSCDRDVNSAKNILIKGMTIMFR

SEQ ID NO: 481 - protein, 537 aa, synthetic construct
  REGION 1..537: note = Synthetic
LKVRLFPSEKKQYDKRLLADCARQRWYYNACIDIFDWENLKGKLEEAKDKGLPCPSFSANEIRNRLAWHEYMEREEVWGDKNFILKSFAFREDCQQEQIEKAKLKLEKERKQAERNAANKIKRLKENEMMRSMSREEKYNFQAQLREERERLKEKAREKLQESKKINGNMAKNKRDYPQAEWIENCYGQKIEGRTLERIIRGACANFTSNLNSAIKNYYNGHISSFNLDFRRSKTINEFLSFDDGNYPTYIKNLTGYYGYRNGNRNLACNKRRVHLNLQEIISQHPQTAITITHDKQTKEWTLHFPVERDWFPSDDRRGENQAPQTVNGEAIGLDPGMRKFLTGYSTTGEILTVGNRAYKKLTPYLNRINTLACEMAQLRKRKAQLTDAKLLLEHEKIAAAKWREKFELWKHVKNMITDLHWKVATYLCRNYQYIFLENLSSKSCVKGNIAPFIKRILLQYSFHKFKQRLTYMCERYGCKLILVAPALTTKTCSNCGDINEVAKSETYNCPNCSFSCDRDVNSAKNILIKGMTIMFR

SEQ ID NO: 482 - protein, 491 aa, synthetic construct
  REGION 1..491: note = Synthetic
LRVFPTENEEKKLLQETAQHRWYYNAYLDIFDIDKHMKNVHEALSHNEEIKAKNTETIGKNKEIAIANKKILQENKKNDENKEPIPRIPLEKRLFAPQISWRTMQTELKHYVYQEKLDGNMRYCEFVRSETKNKKYPAPTWIEDSNKNQVDPKTHNRVIRGAVYNFVSNLNSAVSNYFNGNIDSFNMNWKTSKGKHEFVQFTDCRYPPFYRDLQGKYCYRLPEGAAKRRTSITWNELLLIHKKSGISVVQDKQTKAWYACLPVERNWLPPNDHRSENQRNIIRGEAIGLDPGMRKFLTGISTTGELIFYGDKAYKEIIPLLFKISKIEAILRKHRKKENILNDVEVQENCKLKQRLWERVKNLVEDLHWKCITSLVLHYEYIFLGDFKVKDCCKKKEGQKNLAGIVKRVLLQYSFYKFKQRLEYMCEKHGCKLILVHEALTTKTCSSCGSIKEQGKSETYNCSACNTSFDRDENSARNILIKGMTMLTGNY

SEQ ID NO: 483 - protein, 569 aa, synthetic construct
  REGION 1..569: note = Synthetic
MTRSGDGFEKRRSKRFGPQEIGPTTATISPASSNRNLSGKSSTPVSLAMDSVPSSVTSSSSSKRATPSTKSSGTSGAASTSNERDFLPFWSPLCNTISPKLWLPTATDCVVSGSSWWNPSSNEEEVRSPSYVRTSTVPRKSWSKTSSLLLRSSLRASTDSAAITEPSKLNSKVQVPLLTRTLRLRPGNGSLLPLAMDQFRWYYNLCVDLYENCRKEMGRVSYIGLRGFLGHVRLVKEKGGVPYYRISKRRTLWPRSSEWESTPHNRIVRGAIKQFVGAYRSSRAQHAENKFELGYREKKNFQLLFFDDKNYPKWIDRLPGFYREGRKKTPWRELPEAGARGLTIDKKWGRYYLHLPMTVPPITQPKPTERVIALDPGVRNFLVGYSPNGLATKIGAGFAQRYLASLEEEDYLRARLTHLENLEKKEGQQPLRRRIRNMQKRHYFLLRNFHYQVARYLVGTARVILLPTFPTSKLVRHKSTGRKTHRALSRMAHYRFQQRLLFSAQQRGVQVHLVSEAFTSKTCSRCGFLHRKLGSADTFACPACSHTIDRDLNASRNILIRFLVSTREE

SEQ ID NO: 484 - protein, 374 aa, synthetic construct
  REGION 1..374: note = Synthetic
MDQFRWYYNLCVDLYENCRKEMGRVSYIGLRGFLGHVRLVKEKGGVPYYRISKRRTLWPRSSEWESTPHNRIVRGAIKQFVGAYRSSRAQHAENKFELGYREKKNFQLLFFDDKNYPKWIDRLPGFYREGRKKTPWRELPEAGARGLTIDKKWGRYYLHLPMTVPPITQPKPTERVIALDPGVRNFLVGYSPNGLATKIGAGFAQRYLASLEEEDYLRARLTHLENLEKKEGQQPLRRRIRNMQKRHYFLLRNFHYQVARYLVGTARVILLPTFPTSKLVRHKSTGRKTHRALSRMAHYRFQQRLLFSAQQRGVQVHLVSEAFTSKTCSRCGFLHRKLGSADTFACPACSHTIDRDLNASRNILIRFLVSTREE

SEQ ID NO: 485 - protein, 496 aa, synthetic construct
  REGION 1..496: note = Synthetic
MTNLTLLEEVDITLSKLRGKVSGYDPPFWSEEIQKLSRKLWIPTEAMVGANVPTNSWFDHKLFPPVSKSTKFLKENLKPDLDGFKTIKIRIFPDQDQRSLFQSWTHASRWVYNYTVDILDLYFKGKVSDTKVRDFIRTTERLEELVEGQARLLFTEYIITKKNEFPIPEWMEELKFNKRAYRGAIKNCVANWNSATSNKAAGNISKFKLKYRTKKDKNYFLSFENWCCSKNPFPEKLGHFRGWYKKGRVKFDLDHILEVIQHKNATLHWERVTNRYYMILPMSLDFNPILNGLFKGSQIETTLTKSTPSENQALVRKSMVALDPGVRTFQTCYSPTGLYEIGTGARVKLLKLFDRADQVYGKKKLKILLKVRNMVNDLHWKTIKFLCSSHSAIFLPTFNTSQMVKKKNSRPEVNRILLAFQHYKFQEKLVWKSKQWGVNVHIVNESYTSMTCTSCGELDRDHHGESIFDCPSCLVKIGHDHQGSRNIFLKSHNLLY

SEQ ID NO: 486 - protein, 493 aa, synthetic construct
  REGION 1..493: note = Synthetic
MFINQKNILIRRIHKLSNSLWYPINLNNNVFNFNEYNKPIHNLNKFYNLNDSWFDNEFLLNSDIKNNYEPNNSQIPTCKITKTIKVVLKPNNNQIKLINEYFDIYRYFYNRTIDFIEHKKQYNYKIVKRDFKTVKFTFDESTKKYNLSDNDMKKFIIPDWVVNKNIPKRIISNSIIDCCNAYKSNLSKLKNKSITKFKMNYKTKKDNINCLNITKDCFSKDNSLFSSFLGKGKNKLKGFYYTTKHKWFLLTKNEYTGNPKSRIKINIDNININQDCRLNLINNKYILFIPITVDSNKCINDGIISLDSGIKTFQTGFSNKNYCIKIGNEPINKLNKYKNKCDRLKSLIDTITDKSIKNKLQEKLKITNLTIRNKIDDLHWKTINYLTTTHSHIILCDFQTKSISSKAYKTTNRNLYLLSHYKFKLRLQYKCKANGCKLDIVNESYTSKLCSKCGYCKDNLKLSRVYKCNECKSVIDRDINGARNIYINYLGSE

SEQ ID NO: 487 - protein, 464 aa, synthetic construct
  REGION 1..464: note = Synthetic
MDCENTIQKSKKNLKPETYIKTLKIILKPNELQKNILNQWFDVFRYFYNITNEFVKKYKIFNFRKVRNILRKLNYIPLFNYNNKLTGYKFTTKQIPNKFIVKNKKIKNNIVKYKKIKNNIVKYKKIKNTTDLRKFNLPEWVNENIPPRIITGAINDCCKSYKTCFTLLKTKQINKFDIKYKSKKKDNILSLEKSCFGVNNHLLPRFIKEPINGCYCIKNKVRKNKKYKINRRHKIELKKIKITKDCRLNLVNGKYILYVPVNDIKKVNNNTNEIALDSGIRTFQTGYSTNNVVINYGTNIETKINYLFEKTNKLQRYYSKTKNPKLLVKIKRTNLTLRNKISDLHWQIINELVKTHKNIILGDFKTQEILRKLSSRNNRLLNIMRHYDFKDKLKYKCDVNNCNLYIVNESYTSKTCSNCGILNNTLGISKVFNCGCCKKTIDRDANGAMNILIKHKMKLSVKLK

SEQ ID NO: 488 - protein, 557 aa, synthetic construct
  REGION 1..557: note = Synthetic
VTKEKLNVSEKEEKELIGIIMSSPSLKTKEQSNENQKKQEEKFVIAESLPETKQMILRGKNNTSEQDIQHTNSLRTLDQVLTSRGKDLKPFWTTHTTENSKNLWLPIKTDCVDSDSTLLNTSLQNSQKEKSLFSMTVKVQKMKNLSRTSYQSSLFSQQESMVSESIKPAFSQNFSLKMMRIRIIPTLEQKNMLNLWFGVYRRFFNEAKIKSENTKTYSFQNLRNSLRENSKYVVPEKWDKKLIPPRIITGAIKDYCSAFKTGMSLLRSKKINRFQVHIKRKKQRTQTLNLEKSCFGKENVLFPNLKLKDGETRGLKFFGTYKLKKKKMELKEIPIEHDCRISYQYGKFYLLVPYEKKEIVTEPKISTISIDSGIRTFQTGYCPEGHIVEIGKNPLEKLRKQFDRIDILNRIWIEIFHRKGMRTTRKQRRIYEKMKNRVDDLHWKTIKFLTTNYKTIVISDFRTQSLLKRRELGRQSKRTLGVLSHFKFRQRLIEKCETIGNNLHIQDESFTSKTCGKCGIINPFLGSSKEFICPSCDYESDRDVNAGRNILLKFLQS

SEQ ID NO: 489 - protein, 725 aa, synthetic construct
  REGION 1..725: note = Synthetic
MKKKKKKKNDFLDSQINNDNKIEYNLKTKKVIKNITNKNKLLNKLKNVKQKNVINESNIIINESDIIINESDIINESDIINNNTKKIRKKRSTNKKFDNSDISEKKLTKKEIIELEKIEQEKNNINNHIPPWESDDIKIYRNILHFPNSNIPEIINPINCNLFDSYVNKQSNNDFNNFLINNNYNFKELNNKDIEIQKINVERNEHINNIFNKYTKINENLTDAKNQDIKDIQEKYKKYKQNKKIIEGKNKINEIENDYVKKHSDNENIKNKTIKNANKLYDDKIKCVRGSIKSYKYRIIFSEEQKKIVLNWINICDNFYNFCVLRHKEQKVKGYINKNDPKSYNLDKDPHSIKTKVFEDYFNVYLKNNYKKFNHIKFKPLNVKNISDYHKDYQIDDILENKPLPYDMITDVLSEFSRNLKSNYTKVKQDPNFRFNMGPKDHYRTYKTIFVPKKSIGLNGLFFNYLGKIKKYNKNLIKVINENKINHDCKLSYDSLLDKFYLHVPQYVEHKKRTENKEKYVAIDPGEKVFSSFYAENSYGHLGINMREKILSLKNKIERIERILSKNKNKKNKKIRCKKKLRKKKHKLEEKIKNMVKEVHNKISLYLCKNYENIILPSFETSKMLRGKLNKKVKTVLQRQSHYKFKEHIKAKSEEYGSQIYIVTEEYTSQSCGICGKLSKNYKNRIKKCSFCKTKIDRDINGSRNILIKNMFNILCGAPRPQASY

SEQ ID NO: 490 - protein, 561 aa, synthetic construct
  REGION 1..561: note = Synthetic
MICEWFNNSTLKLQNYIPSHTEFKNKKVHKNYTNVLSSIKSYDSSTLNNNKSNFKFNLFTDDVKNNDELIRSHKYQINFSKEQHLILKSYFEESAGLYNFCVDIWKEYSNISSSWQLVKDVIFKHLYRSNEDNEIDVIKQLIITDLKKLKNDYDAENTKNKAIIDKLKEEYKKKYIEECNKYKEVLKNNKKVIVKIEIVKPKMQKIKIEKIKKPAKPRGETIKKPAPDETLKAEIRDFCKNLSNAREQIYEQNLKNKNKVATFELKYKNTDTSQTISISKRNITEDGLFIQALGNLNCDNYKKIVNKYPLDKECKLQYDKILNKYYLYVVFEGTDIKIDNREEVVACDPGEKTFITYYSIKEYGNIGDNMRMRILALQRQIKKYQSILDKKKNKSGKRIKNKKRLQNRNRKLYLKIKGYVNEIHKKGAKYLCENYKNILLPTFETKPMISNYRIKLENERIKKINNKEEAKEELKKLNKTLKMSKNVKYVLSQQSHYKFKRYLKAIAKRYGTKIHDVDESFTSQACTNCGILSKEYNKNRLKSCICGTKIDRDFLVEYCML

SEQ ID NO: 491 - protein, 547 aa, synthetic construct
  REGION 1..547: note = Synthetic
MKIEKPPDKKAQNSVENFAPWFDKNISKQIIDYNDPTFISKQFTKVDNNIHTEIVYTTKLANIDYKPNQEKDVKKEALKLLDKYLDNIRENPAKKEVKKSTKKLSKTPAQKLQQEKELKTKFYRDLNEIGTVIKTTKHIIHFNQKQKEILYTWIAECRKLYNKCVDKLNTNKKYFNNGFKAIKAEFLGSVYGKIDKPAPYDVLSQVVRDFCSNLKSAFTNKQKGNIKRFKMNKILATATNYSLYIPLKSIQDHGIFTTKLGKVDNFPKLNTTHDCRLFYNYHQDTFTLLIPTTFHCKPIEKREAICAIDPGESKFISFYGLQSHGYIGKGIRVPLLKLRNKISRYQKVLDKNVNRKNNKLKNRKQLRKKIRKLYKKTKCIVKELHNQSANYLCKNYDKILIPKFETQKMISNKKKFKEYKMEFINKGETTIEKNKNARKFTKICRLSKNVKYVLNQLSHFSFRQHLANKAKEHGCLLKVVTEEYTSQACTKCGMLSKTYNNRIKKCGSCKYEIDRDINGARNILIKNINEFPKLKCKATRPMVSTNH

SEQ ID NO: 492 - protein, 556 aa, synthetic construct
  REGION 1..556: note = Synthetic
MSEWWTKELSSLFPMPTDNDFNSFLISNFGLIKHNNNYMENFYFKDLTFNNLILNNITHIDCDDELKKININYNKNVNKINNNNNLINKIKQIKIKTLETKKNRAVNEINCITKTRKIEIHPNKKQIKILNKWFKECNKIYNCCVSLYYNDNDFFECMNVYDKIKIFDKIYGDNDKKAPYDMLSDEVRIFFSNYKSCKTNLKNGNIKHFELKSKDTSKSQSVFLPKTCVNKNGFYTSYLKNMKGFEKIDIDLKKINDSRLIFDKKNKKYYLCFPYQEKIKEKTNKIRIVSLDPGEKNFLSYFSEIGYGILGKNIRTKILPLEKQIRIYQRILSTKRNSTYERYGKSVSKYVLSKIKSKYSKKKRIFIERKIRKNGLLKNKNKIKKKIRRCYKKIKNLVKELHNKSALYLVKNYERILLPEFKTQNMISEKKYNKKYFNNLLIEKGLEECKKEIKSVTKKRRLNGRVKFVLSQLSHYRFKEHLKKKSIEYGSEVIIVTEEFTSKTCTNCGCQGTLYDKKRIKLCKCGVKIDRDINGARNILIKNINKVVKPKGFDIS

SEQ ID NO: 493 - protein, 523 aa, synthetic construct
  REGION 1..523: note = Synthetic
MVVNNWFDKNQSDTISLPSKNNFKSIKNSINFGQKQYNSKFNKSFKFKNPTNVFNFEPVERITETLKLKKLRTQLKNVLDRDPENSTKIKTIKTKIIKEQNSLNKCTISKKITIYPTEKQKKIIHKWFYECIKVYNKCVELYEKDKKYFDLGYMKRKIDIFKILYDGKKPAPYDMLTDEVRIFCSNLKSAETNLSNNHIRKFNLNKKEYKRKNYSIFIPKTTIKNDSIYKSHLGKVEGMKNVKNIKTINDCRLIYIKDKNRYELIITTNTNIKNINNREKVVALDPGEKIFMSYFGEKTFGMIGENMRTKILEQEKEIRRLQRIFNKGQNKKGKKLKNKKKIQKKIRRKYNKINDIVKELHNKTALFLCKNYEKVLIPEFETQKMVKNKIIKKENISREELKEKLKEYTKERRLDGRVKFCLNMLSHYRFRQHLINKSNEYGCKIYIVTEEYTSKTCTKCGHISEIYKNRIKDCEKCKYKINRDINGARNILLKNIKKGGREVAGIDVYHRIVIKKCIEKDNK

SEQ ID NO: 494 - protein, 652 aa, synthetic construct
  REGION 1..652: note = Synthetic
MGRTVKSCKSRKRDSATDDPKICVQNNYDSPDWYDLNISKLINLPISGPSGNYTLSDKNIGLGNVVFNNRYIKHYSFNNKSNCEIINTLLINTSDSDITKLTKTFEKSIQTVRTKFVDDSNKINTKIKTLTTKYNKNVSNINKVTICKKYRIYPDSKQKEKLHKWFDECRKVYDYCIEKYNENTSYFDNGYMSVKVLLFEEMYGTNDKPAPYSILTDEVRIFCSNLKSCLTNLKNGNISSFEMKPKNNHNGQCLFIPKTSMTENGPYIKYLGKMLGMKHINFDEVTHDCRLIYNKDHKSYTLLVPVNKEKTVIKGRKKIVAVDPGGKIFMAYFSPEDFGYLGYEFRGLLLKELEKVSILQRILSRGYNNYGSKIKNKQSLIRKINLIYERMRNLRDELHNKIAKFLCENYDTILLPKFETQKMLKTDPNYRKAQKNVETIYNEKGSEAGKEALRQYKKKKRLNKKDKFVLNMLSHYRFRQHLTHKASEYGCKIKVVTEEYTSQTCTNCGHKSTNYDYREKKCEKCNYKIDRDLNGSRNILLKNISGYIKQEDLSINSKSNCDNDSEEDFINEEKGFNNEDYSEYMDEDPNDSYNNVMEYFDNLTSDKKFGHDNEQIEKYTKKILYKIIKNKADRSLDKKSLVAGRIAPMRNC

SEQ ID NO: 495 - protein, 535 aa, synthetic construct
  REGION 1..535: note = Synthetic
LIIYYYIHTTSTDTTKDTDITDTLICQWYKKNVKKLSDNLWLPVITDEIDYKPKYSFTQTTSIKFEAKTNKNLIKNNIDYVSNQNDIKTYIEHFNKRLNKLNNSNLNNDEKKKKKIKLYDEHIKIFEHYNDVIKTTQIHLNLNKEQKSTIEYWLIECDNVYNYCVKKYNENPYSFDMNYKSLKLEVFKQLYGTNKKPCPYDMLTDEVRIFCSNLKSCQSNLANGHIKHYTMKRRNTNYSQSILIPKNSITKTGIFPSFLGDIKGFKLDSEYANCDSRLLIDKIHKKYTLCIPQYQKKFFEKQTEKIINNIECKQIYDKEINEIGAIDLGERIPFTIYSENHYVKIGEDIRKNILDYQMRIRQMQRALSKNINKKNKRLTNKKKLKVKIRLTYRHIKNLVKELHNQTANYLVKNYKKILIPEFKTQEMIKNINLTDNKQKARVNKLDKRVKFVLLMLSHYRFRQHLTNKCVEYGCQIDVVTEEHTSMCCTKCGSLSKKYNGREKHCDNCGYKINRDVNGARNILLKNAKQHIKLRL

SEQ ID NO: 496 - protein, 520 aa, synthetic construct
  REGION 1..520: note = Synthetic
MNDKLNHVLKFDKARECKWYNNKTIDNSIHLWYPNNIKFTKNNKYSNKNYNIENCININQSKFKFNIKNVASSYEDSLNEINKKYNLKLSKLEQNYINDKDKLNIQIKTLNTKKEKEINSINKVLHTKPYVLQLNNNQTNTIFNWFFECDRVYNRVIYMFNNKNPNFVMDYRKLKLVIFNDLYPDKKPVPYDILTDEVRIALSNIKSCMTNLKNKNINNFNINYRSFNLSNRRSILIPYKSITNKGIYSTILNKISNFDKLLKYIEDIKNIKSDCRLVYDKITKKFLLYMPIYKDKRNIKNRNEIVALDPGEKIFQTYYSSNECGKIGENIRLIILKYQDKIKKYQRILKKNTNKNKKKLKNKITIKKKIRKYYQKIKNIVKDLHHKTAKYLCEKYDNIIIPKFETSKMIKNKNTNTNINKDEMKRISKMNKLNKKVKFVLSNLSHFKFRQYLSYKCVEYDCQLLEVTEEYTSKCCSRCGFLSDNYEKREKICPYCNLKIDRDINGSRNILLKTLNEIGR

SEQ ID NO: 497 - protein, 649 aa, synthetic construct
  REGION 1..649: note = Synthetic
MKPREKIKEQIEENDEQDPKFVWYTDDLKQYNQFINYPSQNDVRCNLEYEFNHHDNFFTHKHFNFPEANPNDLNETLNYNAITSIDHLKVEQQLIKKYNKSVLKLNNNTKITDTQKQIRLKTLLTRHNKAVNNIGKELRSRTCSIQFDTKQSNIILQWIEECLKVYNECIKLFYENRKNNLKMNMKMNMKMKYLKKTIFNRLYKINKSYFNSSIKIDSKYISKNNTHLIAFGKAYKSIKNLSHEIDANIKYSFIIINNANYRQNISLLENCLGINHFLCKLDENDFEKIDICIQLYETHKFMTSETIVNLEKKKNCPYDTLSDELRSFCSNLKSCFTNFKNNGIPFTMKEKKMKKSYSLMIPIISITKKGIFPTYLGETNLNIDVKDVKGDSRLIYDKRENKFSLSYPIYVDVKPKEDKQKTCALDPGESIFQTYYSLDGYGTIGENVRKNILEYEYKIRKLQRIISQGINEFGEKLKNKKSLMKKIRKLYTKIKNLVKELHNQAAIYLCKNFDTILIPEFATQKMLCDKKEIKKKYKETIQDYLERKDKEGLKKYNRQTRLNSRVKFCLNMLSHYRFRQHLICKANEYGCRVLVVTEEYTSQLCTKCGMLSKKYKEREKICTHCGDKIHRDYNGSRNILLKNILEIYS

SEQ ID NO: 498 - protein, 506 aa, synthetic construct
  REGION 1..506: note = Synthetic
MTETKKCAWFSAKVRELSGKMWNPLTEHKVIPENKNGTIMERHVNTNAITTFENIKIASDAKIKTAKIAEEHKKKISELSSVAPTYEARKAELNTKYERKQINADKVIRAKMIKIYPNSAQRATLKLWFAECSRVYNKCVDLYNENPSNFPLNFKKSKLIVFSALYPAEQDKGCPYDILTDEVKTFCANVKSCLSNLAGGHIEGFKMKPKNTSVNQCIGVPKTAVKKGSFYPSYLGRMSGLDAETCECDSRVSYNHARDNYFMFLPQYREKTIIADRADFVALDPGERIFQTYYSPSEWGKIGEDSRGRILKYESKIRKFQRILSKMEKDKCKSKTRGKIKNKINRAYCKIKNIVKEMHNQTCNFLCKKFDTILIPEFKTQGMVRRDGKKKIKATVSAMKTNDAAKSQFREYSKKVRLTGRVKFVLNMQSHYKFRQQLLAKAEEYGCRVEVVGEEYTSQCCTFCGFLSSTYSNRIKHCDKCASTINRDLNGARNILLKNYKKIIRL

SEQ ID NO: 499 - protein, 592 aa, synthetic construct
  REGION 1..592: note = Synthetic
MQNTTVCEWYTDKIKCINDRIWYPENIVENDDIKYPFNSEIINFKSFANNFPDKSQDLITNQKQKTYNEIKNQLTKRYYDMLIGLMTKTVADTYNYLQKTDNIKKFDDYEKLIQSTKEINSNKSLSREQKFKQTKSLIEKESGIVKGKISIPTDFISITNKYISKQNKSKDNMNKAIRLINVSIHSYKTKICVNDKQKTKLLQWFDTATKVYNKCVDLYNSKDPNFTSNYMTAKQYVFKKVFVNKKKETPYDILTYEVKCFFENLSSCYSNLSNNNINKFELKHKNTNKNQTITISKNGMRTTGIYPNLLGKIPDFSKHININKFDCDCKLTYDKLSGNFYVYIPQYIKNEKIESRKPICAIDPGEKVPFTYYSLNDYGFIGNDIRIKILARESKIRQLQRLLNKSITKNGNKMNKSKLKKKIGKEYQKIKGIVNELHKKSALYFCRNYDTILIPKFETQSMICDKQIAKNKIKQKYEEIKTENKDDKKVLCEKLKEYKRHRRLNGRVKFVLQQLSHYKFKQHLFAKAKEYGCLCVEVTEEFTSQLCTVCGDCSKSFIGRTKRCITCKSEINRDVNGSRNILLKNISGFLKS

SEQ ID NO: 500 - protein, 671 aa, synthetic construct
  REGION 1..671: note = Synthetic
MANELKRAPWYNDNIESLNKRLWTPNGNLITKNNVKFNSKIIEFSSFKNTVLNKLNNYCNIDDLNRFKEMRQHYINILIRLLNDKKINHKLYEEYMNTKELNYLNSNDYKEDHNIINFKENSNNIQDCYDKLFHEYKKEEQIFEQLTEQNLKIVNINVNSYQKQYNEITKSFHSKKLALIRKQKKCTDIFNDYISRTYNNKLYGKNINKYLNDNAIEDYNKQLSIFKAKNYKLTKKYNNSIKMINKSIRSYKMKVKFNNEQKTKIFKWMDEADKVYNYCVNLYNTDKNFPSNFKGGKMYVFNKLYVKGEQKSAPYDLLSYVIKVYYENLSSNYSSLENKTKTHFEMKPINNNKNRTITIVKNGIGFNGIYSSILGINNKNKKFNNDNIACDCKLTYNRTTRKFYLYVPQYIEYKQTNYKKKPICAIDPGEKVFATYYSLDDYGCIGNDIRKPILDIQAKIKKYQRLLSQIVKNGKNYNKKNKKGKPINRTKIRKKIKRLFEKISGIVNELHKKTAYYLCRNYNIILIPEFQTQKMVSKSDMNKQSHESQKQNKLNKEAIKEQNKDNNNNLRHELKLYKRKSRLNERVKFVLNHQAHYKFRQHLLSKAKEHGCLCIVVTEEFTSQLCGNCGGLDSTYIGRTKRCKHCNHQINRDVNGARNILLKYISNYIKH

SEQ ID NO: 501 - protein, 525 aa, synthetic construct
  REGION 1..525: note = Synthetic
MDFMDYKKYSIYPPWWSLYSILYSEELWIPLKNNNTKQYIPKAKFDSCSKDINYECFTENGLNKPIFPFVKFLGNSFFDGMEKQIILSKKTNAKIINLVKKKKFDQAIGAGKLYRKQLLHINEYIRSYKVKLILSNKQKSTIEKWAKIATIVYNNCVDKYNKANGKITLNFTKLKKEVIFSIPALLRKNCPYNIMSYEVKVFCSNVKSCLTQMKQNNITHYKLKHKNTKESQTISIEKQNINKNGFYTQSMGKVNHNDKSFSFSNIACDCKLTLNKKNGEYHLFIPQYIKGEQLNNRDPIVSLDPGEKSFLTFYGMDHAGMIGNDIRKKILGIEEQIKYIQRKMNKNKKKRKSLLKALRRKYRKIQGFVKELHHKSALYLCKNYNIILIPRFETQNMVSDKKKCIEKIKENKRNIKNNSQSNAELRNNLKRYKRVTRLLSRVKFVLNNLSHYKFKQHLLAKGKEYGCLIVEVGEEYTSKCCGKCGHISDQYKNRIKKCPMCNLEIDRDYNGSRNILIKNLLEIKG

SEQ ID NO: 502 - protein, 639 aa, synthetic construct
  REGION 1..639: note = Synthetic
MNIGFWDQSCSQFTTKLWKPPLKRIFTFPSWESDHPLLPIHYHHNQSNLPDVNLLPVKLYDNSVDKLKKFNMLFGREIGRLDKLIIRKKFDFPFFSNYVTKLQTQLDKIRNETPDDKIKLCFEFSNETFAAFKINFKKKTNVPVDVAQSINAHFDVFDSILIKMKQLDKVLRCYPIRLFPTGVQYQKLARWFIRANDLYNDLVGFFEIHYINCEEECDELYPNDPNRSRKLGKLLEKKNNFFPLNATKIRDMYNSHFSKKHKLPNCVSADIISGFMSNVKGNITKLKKGSINEFKMQRRSFQDICSIPIQQKYTNNEGFYSSIFGPIDTDENNKFSWSDIEHDYKLIYNSSLNRYYVYVPFHKDTKIINNRNPIGIMDPGSAVFQELYGLDHTVSFGVGLHKPIMKRINKIEYLQKCIDDPAFNKQEKAKRTGIKRIQELERKKRYEKEKKEYQALLKIPKKETKDAKNKRVQKFKRIERQEKRELTVNVPNKSSKKKSLNKAIARERRKIKGMVTELHNKTCLYLCKNYDRVMVTNFSCKKVNSKFGKLNKDVKKVLSELSHYRFRQRLQNKCAEYRCQYLEVTEEYTSKTCCNCGNIKHDLGSLREYKCEKCSKEINRDVNGSINIFIKNRAKVVEE

SEQ ID NO: 503 - protein, 590 aa, synthetic construct
  REGION 1..590: note = Synthetic
MLKPFWNKKCETFSEDLWKPDNKDLKKSKEDTPYWNCDNKNISFTHYLPKKEIDINIDFDFKPIPTINNIANKRKMFYGSFNVEIKRLETKIKKNKIKHNDIIKYMNIIKKTQIDAEKNDNPIKKHKEFIIKIRKELAFFKNKSSKIDTKNKCDPIMTQHFEQVDKIFEKMSRLDDVVYCKKVKILPDSDQQDIFISWVWNTIEIYNNLAEEFNNIQDEILEKYEETDKRIYYSKFLIAELKNYPNFPIGGKNLRNVKIHSLTEEYSDIPFCVISDTIMEFASNLKGNLTKLGKGQIDNFYFKPRKFGKKNKTIPIQQNYTSDRGFYPSIFGEIETDDADFDWKSICSDYKVVYDKYKHTFNLHIPSYKKVHIVEHDRHPIGIADPGMRTFQQLYGLDHIIAIGEKMYKPIMEKINKIESMERRIKDNSKARKNKRTRNKDSKRISNSTKKNLRRAISRTHSKIKDVVSEMHNKTSIFLCKTYDRIMVTDFSSKKVNGKEKGLQKNHKKVLGKLSHYRFRQRLAQKCLEYRCHYIEVTEEYTSKTCCNCGNQKNDLGTKKHYDCDKCNMSIDRDTNGAINIFIKNRSEVI

SEQ ID NO: 504 - protein, 547 aa, synthetic construct
  REGION 1..547: note = Synthetic
MFWNDKSNNLTKILWKPSLLIDHKPNQRKYFRCSNRNISFNYYSDNANINPHLKHYRNYYSDNANINPHLKFKKMPNIDNTTKKIKLENRLEKIECNRLDKEIKNPKSKLCYNELKEKHFNFMDKIDNKVNNLDGFVRSHRVQIFPNDQQKKIISQWFYDTTHVYNKMVSHFTQIYDHYYKIVLDMDIDDNDRSVELGKLLKSNKEFPLNFKKLRKDKIEEFAKDYYNTPYCIIADTIKEFVSNTKSTTTKLIKRQITEFQFKHRKINRICHSVTIESHYTTDKGFYPSVMGKILTSDDKNDFQWSNIQHDYKLIYDKYTKKYYVHIPKYVFKKEPMARKPIAIMDPGERTFQALYGLDHVIAIGENMRDVISKRLLKIDSLKSKLNEKGKWKYNKKLKKKTKKKKHKYKRAIHRHHAKLKHLQQELHQKTAIYLCENYDRIMVTDFSSKRVSSKKGNLDKMTKRVLGKLSHYQFRQCLQNKCQEYGCQYLEVSEAYTTITCSNCGNLHKTLGTAKIYECIICENIMDRDVNAAINIFIKNHELVLK

SEQ ID NO: 505 - protein, 406 aa, synthetic construct
  REGION 1..406: note = Synthetic
LHVDGIVKENTMIRSKKIKLLPTSLQKKLLQKWNNHHRYTYNKAISIINEDPVEPAFRNYYKTFGNENDISYCIKTSSKTYYSKLELRNLITPAEASSRIKWILETPKSIRESAVFEAKKNEKSAISNLKNGNIKHFTLTYKSKKKKSWSYKISHDSLKTYNNKSIGIYESSSGMRIKCTEKIDSISSDSEIYYDGLNYFIIIPYEKSIKESEYTNWFIAMDPGIRKFQVGYSPDENEHIIFGNRSSLNIYDKLLYVDYLTSKRCKMKTEKRKRILDKLRLRILNLQKELHYKISNFLCKNYENIYIPKLTKGNDIIKKNVRKINKSTVRKMVLLGHCKFIDRLKAKAEEFTKTKINIITEEYTSQQCLNCRNLTKTCNEMYVCKHCNDKIDRDVLGSVNILLKNW

SEQ ID NO: 506 - protein, 236 aa, synthetic construct
  REGION 1..236: note = Synthetic
MSSGMRIKCNESVPTINNDSEIYYDGINYYIIIPYEKHISNIDCKSWFCASDPGNRKFQVIYSPDDDEHIMLGERCSSKMYDYLLYLDYLTSKKCNIKNIKKTLLIKKLRIKINNLQKELHYKVANYMCNNYENIYISKLTKNNDIIKKKNRCINKSIVRNMVVLGHCKFIERLKTKAEEFTKTKINIIDEHYTSQECLRCRRKTKTKKELYKCNYCNYMIDRDILGSVNILLKNL

SEQ ID NO: 507 - protein, 582 aa, synthetic construct
  REGION 1..582: note = Synthetic
MEDGLVLRRLVSFMESRETLLDDGQTLVLLSLKERLAINVLISYLQMVFLQYQKTPEKIICMLEFHLKSKRTIWKDKYHFYPVNTQAISLLKTLLQVSTIKEKGFWDCWKKVMQEKSMKSWYLAKTDCVVSDSNYLNGRFYKTIQNSWFTNSQTNHQNKNLLKTFLPFYKFLLVGGMEKEDIELIRSRKYRLKLNSIQKKTFKKWEQHYRWTYNKSIGLINNGNNHCVDTKNIISHLGPIEQTASTGNYYTKFGLRNLVTSEEVNCRNPWVLETGYNIRANASFEAHQAYKTNLEKVKSKSIKYFDLKYKRKRNITWTIGISKENIIQKDPKRLFIYESTGIVTSTEAIPEINKDCKLHFDGKYYYLIVPRTIEKRPSKAKNWFCSLDPGVRKFQTLYSPDGNESIIIGDRASTEIYKLLLKLDKCNDSTKEVKLRHRIKNLQKELHDKTSRFLCENYNNIYIPKLTKENDIISNKNRTIRKKTVRNMVVLAHCKFVEKLKTKANEYTNVNVHVITEEYTSQICLSCKKGTKCGTELYKCKYCGFQTDRDYLGSCNILLKQWGLLEVPRQDTANVDMRFSVM

SEQ ID NO: 508 - protein, 434 aa, synthetic construct
  REGION 1..434: note = Synthetic
MTSFPLSKFIAASGTDAEDTVLRTKKIKLRLTSNQKQMLQKWNSHARYTYNLAVWRLNVDIDTQTKLNLRNQITPANCNNGKEWILQTPKEIRARAVFEAHTRFCTGVKQIKNKTIKFFRLRYKDKKYQHANGWSIDIPKQAILQIDTKTLFIYKRITKEEKFKLGERLDVPIEHDCKIHFDGDAYYLIVPFNKKKKTREQDGIVSLDPGVRTFLTGVDGDKTIELGKDSGTILFRKLRHLDHLISKKDKTRDKTVKKILKKRIKKVRIYIRNLQDELHKKTSTWLCKKYSNVVIPQFGSKDMVKKQDRKLKTKTVRAMSILAHSRFLERLKNKAREWRTDVVIVDEKYTSKTCSVCGHVKTKRFRNVYNCESCLMTMDRDRNGAINILKKLFLPKGENRADRANETDTLVRLGIDRGLFEPKPSSHLVVSVCQ

SEQ ID NO: 509 - protein, 632 aa, synthetic construct
  REGION 1..632: note = Synthetic
MTEVQDHSTPTVVIPSDQELKDKEEQLKKEQRKKEENDEKIRKAEEEALGIDIPSLISTLGSVRTSYKKETPNVWSINCQMVVIEFVELILQMSHPYLQLSNDHRKSIVKSLKTNKLNLVQENPDILKSVNQIILVLRKMDKALMYNEKGFVSYMNQFLKDSCKNLWLPEKGDFLDIDSNGLSNRMMLNSWFSIKQTVRSTDFLQKTSPLFYRSLLADEITEESDPLMRSKKIKLSLTPVQKEILKVWVDHSRYSYNRAVSILNVLGGNVSKTSLRDFIVPAKVCNHRCPWVLDTPKPVREGAVFEAHKNRKAGMTNLIRGNIQTFSLNFISKKKESWTLNGLNSVRRVNNREFTMYPTFGLGEFKTKENLPLPTQEELIIPEEGTPYPSLSSYKNLCSMHFDGCNYYLCVPIEKSPEKIVKPSFTLSCDPGVRTMHTCYVPDMETCFKIGDGASNKLFELDEEVEKFKVKAREAKTKQYRRFFKMRIIKNRAKIQYLQSELHWKTARWMCLNFRHIVIPRFGSTSMVCRETSKLSADNKRRMFLLAHGKFLSRLMSKAEEFGTTVQIVDERNTTRTCSHCDYVKNDIGKAEEWTCNNCKFRHDRDCTASRNIFQKQFKKKYLGVRELPPIA

SEQ ID NO: 510 - protein, 372 aa, synthetic construct
  REGION 1..372: note = Synthetic
MHLRTWKFKLKNGKLAKELFQKWANDYRYAYNKSNWLKNEHTEFLSDYDTRDLITPKEINNHIPWFLETPKDIRVGAVFENCKNFKSAFTNLKNKHIKYFNMSYLKKRSKTFCLNIPGSAIKVSESRKSIQIYNSYTNSYWFKLSKLIPKECINDKHYLLKEHKLYFNGDNYYLCLALERNVIEITNRKNLTAIDPGVRKLVTTWDISNKSYKFGENKSSQIKMLLKKRDLYQSRNNFKNFNRIEIRIKNLISELHHKTSAFLCKRYKNIILPELDVRQLIKKVKNKEYRKVMLRMSICKFNELLKTKGILYNTNIITENVSEAYSSRMCSKCLFINKKCSHELKKCTKCLLEIDRDINGAKNIYFMNKHLV

SEQ ID NO: 511 - protein, 371 aa, synthetic construct
  REGION 1..371: note = Synthetic
MQLRIRKYKFKHSNFIHKTFFDWYSDYRYSYNKASWISKESTCNYSGYELTNLIVPTIQGVNNHIPWINKTPSNIRQQAVQQFDSNKKSCFSNLKNKNTTHFSMPFMKKNNRWCINLPANCIKSIKNKYIKVFHIKTKDYKFRLSKELPNSYLGKKLPFQHKIYYDGLNFWLLLVEEIPEKISKIGICSVDPGIRKLATVYSNKTFRYFGKKEYMSLKKIVKKIELSQSKKQKKKKLFLENKKKQILVNLYHQISNYLLKNFNNILIPTLDIKQLLKSGKNNRWYNKMILSMGVLSALENLKIKSSLYVNSTIYSNSIEHYSSKLCSRCCVINLKKNESEIFYCNNVNCKLIEDRDYNAVKNIYFMNKHLV

SEQ ID NO: 512 - protein, 604 aa, synthetic construct
  REGION 1..604: note = Synthetic
MVTSPAQKSKNSSTSATGRSDTGQTPGKLRASELPEDNDDMIYQHSEHQKEITRSKTTEKSSAMLECPLGDKRTTFNDKSVSSNGIAPRVSSSPTSPPASTGNARALRPFWNSRCKEISEKLSWPQGTVCVASPSSSSNGCSHSTTSVSQSSTPKDVPRNKSCPTTSSALCRSFAVAETENVDTSADQTPSSRLLRMRKIKMNPTKTQKLMLNKYADAARFTYNACVSSVNDKTHTANKFTLRNAFVTAKNNPFFEDKKWILVTPKVIRQQAVFEVAKNFKSAFSNKRNGNIDRFKMSFKTLRNQRASGYVLGIERAVKFEDDDVPSKRSGKLTILSKSIGSIRFFEKPPITKVPEAECSIQRDSFGDFWLQVPVYKTRKPSNCGPAVAIDPGVRTPLSYYSPCGSSGFLGGKMKDRIDDIKGCVATVDRRLSKAEGAFRKKLLWHRRRLFRKYTHVRDDFHWKIVRDITDTYGCVILPHLQTSRLCGSLKAKTNREMFGISHFTLKARMEMKCEERGIMFQTPTEEYTSKTCGNCGSINGSLGSSETFRCDCGLVCHRDLHAARNIYMKWFLETERDARAPEAFAPLLASCGHPQESYGSGDA

SEQ ID NO: 513 - protein, 439 aa, synthetic construct
  REGION 1..439: note = Synthetic
MSKLKPWWSEKCQQITKIIPLNPENISFQQTKTNMFQNDVGVKKVFRTRKVKLNPTKQQKMMLMKFANDARYSYNAALSAVNDKTHKANKIELQNAFLSLKRRDGTFNQFFQKRRWLLSTPQPIRQQAIFEVAKNFKVAFSNLKNKNIDHFKMKYKSKKNQRQYGFSLGIGTHLKHKDGVLTIFPRSLGQMRYFGSLPFEGVPDAECRIQRDPYGDHWLLVPVYKTTKTQTIKPIVAIDPGVRTPFACFKSNGESKTLGEDMNVKLTDIRTRVSLIDRRISKCQDVTLKRKMSEHRRRLFRKHQRVRDAFHWDIINDITNECSGVLLPPFETQRVSRMLKNKTNCSMFGVSHYTFRMRIKGKCEEKGLLYVEPTEEYTSKTCGVCGRINYLLGSKKTFECFCGNVCDRDVHAARNILLKWLSTEAGARVVETFLASRSR

SEQ ID NO: 514 - protein, 395 aa, synthetic construct
  REGION 1..395: note = Synthetic
MRCHEISWPSGKLDQHLRNKFSIGKHNDIEQYISIHGNNIEPEQIIETTKMNTETRKKEPSRRYINPFFLGKLWLSECPKDFRARATFKAADAYKTSLTLWRKGLIRSFEMKFSTKRRELDRGYCFGIEKKVKFEDTGLKKRDGKLIITGIDGDIRFFEKPPINKEPVAGCELSKDSCGDYYLHVPIFRKKKERKGDNFVAIDPGGVVPWAFYASKGESGCLGTEMNERMSNVSKKISTIDKKLSGQPKGDKNSNDVIERRKLFRKKKRIRDHEHYRVINFLTDRYDGIILPKLKTKNISKALKSKANHDMFDISHYTFLRRVGERCIESDTILEHPGEQWTSKTCGRCGKSNLPGRERRGTFREYKCLYCGLHAHRDVHAARNIFMKWYIELKK

SEQ ID NO: 515 - protein, 597 aa, synthetic construct
  REGION 1..597: note = Synthetic
MKWKNHAGFLDVTQPSSTVSHSLLSDDGLILAEFQSGERLAISDSIKLVPENLSMTADQITSMSEFLVTNKKTILKDKRLFFLNSSRSTKSSEMLGQASTIKDGDLSPFWNKSKKILSEKLWLPQKIDYVDLDLSSSNGSVQTMGPRSWFSSKMTLPPKKNSLQNCWTSSRFFAVDETENEDTVKTKKVRIYPTPRQKKILATWAHHNRYTYNMTIEKFNNGENMSKTALRDILVTAKNLPDSKKWLLSTPKVIRQQAVFRAKSNIQSAFTNLKNGTIKYFKFHKKKTSLWTMGIEKQINFNTKGEAELFKGEPYKFGKIKTRDKIFRHDKLYLPSSPVELNSKGVLVPKHDCYISKDRYNRYYLLLPIRVKAGLQCKTKKIVSIDPGLRKFMALYSPDGECGYLGINCRDKLWTLLQKLDHYNKLYDYHETTNKARKRLRKKRNAIYRKLGDLKRELHDKTINYLTAKYDHIVLGKLDVGDIVRKEKRVLRTKEVRSIYNLAHYQFRIKLAKKCKAIGKVLHVANESWTSKTCTGCGSIDRWLGGSECYNCKYCGTTIDRDLNGARNILIKTMGELTVRRHESSGSQFTFHSNNEI

SEQ ID NO: 516 - protein, 597 aa, synthetic construct
  REGION 1..597: note = Synthetic
MASMNDKVCLNSIKLAMLQKHLESHKASCDSGLMKKQSTPSEPLAGNGSLTSHQSPVLKLRKANQVDKPSCTPECLLQNKKMILQGNNSSSKINIQLTNIPDESLKSKISDQGSISRGQDFYEFWDSSKQDLYQHLLWLPKTGSPDLVSSSLNGFVPSTTAKSSFSIIKMEPQKMNSEKTSWPLCKYIVVDGTEKEGTKTKPVSKLVTMKLKLNPNKEQKEKLSKMAGCCRYTYNKAVAIALTKGSTHKSLYRIRNRIVTNMANKKANNFFNDKKWLLECPKSARQNAIAVALANIKACFSNLKANNITHFTAPFKKKKNEVLSGWTLNLDQNDVFKKSDSLYVYKEFLGEMKYYGTKQLHKLLPDKNPAHDPKIQKNQFGEYFLVLSVDTPKRTRNPKIYKGYAAATLDPGVRKSLVSYSPENQESFMMGKGHANVLIELLIKYDNLLSKSYKEHLTAKEKMRMINVRKRVFYLKKEFRDQVASFLAQRYDILLVPKLETTKMARKAERKLRTKVVRSMLTLGHSMIYNRIKEKCSEYGTVFMEVKEHYTSQTCPHCGCLNKCNEVYTCKDCNFTCDRDVVGAANIFLKAVRRISP

SEQ ID NO: 517 - protein, 415 aa, synthetic construct
  REGION 1..415: note = Synthetic
MVDVASTAPPKPPLRTLKLKLDPTRQQKLQLATFAGCSRFTYNKAVAIRMAEGSTQKSTFRIRDRIVTGRPRGTDKKENSFFKNRQWLLDCPKSIRQSAVKAAMSNIKACFSNLKAGNIKRFDAPFRTKRDEKERGWALEMDQLNVSKEGDKLYVFKDTLGEMRYFGRKQLHKLMPLANPSHDPKIQKSRFGEYFLVLSIARQPVRERRPAHPGRGAAASIDPGVRKTMVTYSPENQESFMLGRGQATVLVQLLLGHDKLQASLAAAGLTKKQRASVKAQMRRIRMRVFYLKKEFRDQTANFLARRYDVLLVPKLDTKAMTISAGRRLTTKVARQMLTLSHSMLFSRLKEKCAEYNSLFLLVKEHYTSQTCLWCGCLNKCGETYRCSRCSFTCDRDVVGAAGIFLKAVRRTDPQP

SEQ ID NO: 518 - protein, 698 aa, synthetic construct
  REGION 1..698: note = Synthetic
MVSTEIFLVRSIPVSNFSSRLQGVCGCMSPCESINAFSRSAPYSSDNGQKKIKSIMSGHQGELDFTNYPQRSAHKKTACQLRMQEFLHTNSEEILSDKGIFWLNAAPTMRLSQTLDPGSTGNAPVSSPFWKEHSEELSRRLSLQVVTDYAGLPLSSLNTCSRTVDASSQSSTLMTIHQSKSSLTTLCPSFRSSVAGVTVSASTQKSHLRMVKIKLNPTQWQKKVLHLFNSQCRFTYNQALVARRDGDAKLNFITLRNMLVTHKTTERENKEPNASKKSRKPLKIDGEAVKPSVNPFVEDRDWLLYTPVSLRQGAVKQYVAAEKAAHENRRQGNIETFAMQFRKKRLERSWTLAVDKRQISFDGKRLVILSSSLCSENGESGGKNSKRYKPDLEEREKYYRRPKKQPLKELPSETSIRFFEKPPFKGIPPHDCSIHYDQGQFYLQVPVDKTFKARPLAKCNQPVIGLDPGGRDFLVGFDTTGTAKVLGRSQVDKLVAISKRQSVIQSLLATGDKRTRKLLLLQRRKAYHQYYNIKNDFHFQLATFLAKKHSTVFLPKLDHERIKGMLTPKAVDRIQISGHGLFMDRLKQKCFEHGTWLPEVDERYTTKCCSCCGKLHWGIGSSKVFACPFCPNIMDRDTNAAKNILLKNIDYCEIPPVEVALVEGATENACEATGEHAPNSRPPPVVDMMLYDKSRSKS

SEQ ID NO: 519 - protein, 391 aa, synthetic construct
  REGION 1..391: note = Synthetic
MSRCRWTVNQGIAHFNSTSRFNAIDACDEFVTQFPKIENGVEQIIPFWMFDTRPKWIFDTPKVYRYNILRKLGSNIKSAFSNLKAKNIKHFKFNFRSKRKNDVDQLECDEANWSIRTSYNGNVFISMPGGLTNLKVRIPKCDRKKGFSIEKAGGLTLRRENNGWYVDLIYKLQPAEMQDDQKRICAVDPGQRSFLSGFDLQGNSFQLGIDVQAGLRKLKFKRNLAQSRYDKLKVKTKNHRSYKEYQMFARAKRAFYLSTNKIKNYIKQLHYHSCKYLTDNYDKIIIPVYGTQKMVKAGCKKWNDMILSLNHFSFRSMLIAKCEVLRKTVIVCSEEYTSVTCGKCNSYKMDLEDKKVFNCSQCDYKADRDENAAFNILRFVINTALPVLSVE

SEQ ID NO: 520 - protein, 396 aa, synthetic construct
  REGION 1..396: note = Synthetic
VIKLRKIQLKPTKKQRKTLTKYINDSRFTYNEGVNLFNTYGISNHFELVNKIVTKTANYDTIIPNWFYSSIPISIYETPKTIRSQELKVLSTNIKSAFSNLKNKNIKYFKMNFKSKKRLFNEIINEESRTSSITKKDNKEYLNISKLKNIRIKRNKKDKIEYNITSDIKLQKTKLNKYYLLLPYKEDKIENKEDNRICALDPGQRTFLTGVDLKGNIFRIGEDIQDKIKKLKQKISDCQSKLSNHKKRTIIEYKKYMRTKYDFYTQTLKLKNLIKELHNKTIKYLTTYYDKIILPRYETQKMVKSKMKGFNKQLLSLNHFEFRERLKNKCKELNKKVIIVSEAHTSKTCSLCNYYNPLLGSLKKFKCNYCNKVMDRDDNASYNILKNVLLGTLKIY

SEQ ID NO: 521 - protein, 465 aa, synthetic construct
  REGION 1..465: note = Synthetic
MFSHVKKWVKEDIKKKITRTKSLKIELKPTKKQIKILNKYIDDSRYTYNKCVEIYNETGMFKKEKLGPLITSKVVRGGFKDIPENDKIIPYWLFITNFQYKEDNYIIPKNFFFIPPKIPKTVYNTPSTIRKLSLKEFEGAVKSAITNKKNKNIKSYYMSFKSKKKLFNQQFGEEKTTSYLTKINDDYKLSICKLKNINVKINNKDKKQKELLQILKTKKVKKEIRYIFQKDIKIQQTKLNKFYLIIPYNEEVKNEYINNRMCALDPGFRTFMTGVDLKGNMFEIGKNVYDKILKVKYKISHFQGKFKRINSKRGRKSHKEYRAWMISKSMFNFFNLKLKNLIKELHNQTINYLTKFYDIIILPNLRTQNLVDKNKPSWFNKMMLSLNHYTFRMKLNEKCKSLNKTLVVVEEPYTSKTCSNCGSYKPDLGKSKVYNCKHCKNTFDRDLNASCNILKYTLLGKLKHY

SEQ ID NO: 522 - protein, 596 aa, synthetic construct
  REGION 1..596: note = Synthetic
MYQVKLQSKLLDALITRSEHGLILVRLMLLDLKIIPKDFMISHHSFQTSLIALKILTLKNKSVIVESLPNIKKMILKDKLILCKKNTQMLLLSKILVLVLTGNVKVLSPCYNKLKITKWEKLLLHIEIDFADSLSNCLNKYSDYTKLNSWFSIREKPNKLVNQNYAKTFYQLCKFMHVEKWVKEDIQRLTNDLKNMKQINKIAKCRKILIKPTKLQIKQLNNFINDCRYTYNKGIELFNSDNSIYSFFNLRNYLVTKKTKKELKHIVNIPDEIFNTPKHMRSEEIKVLATNIKSAFSNLKNKNITHFKMRFKSKKTSPKILNCEHHASSIKILNDKQYLKLTNIQNPILINTKELINLENDFKIQCSKNNKWYLLVTYYDDIKENKQYNICALDPGLRKFMTGIDINANKFKIGDGIMQILSKLKIKISNLQSSLHKLNNKRKNLNSKKLYNKWNKCKQMLITSREKFKFKIKELHYQTCNYLCKKYDVIILPNFGVKEMIAKSSKWLRKSILQLSFCEFKERLKNKCKEYNKTFILTEEPYSSKTCSLCENYNFNISKEEQITCNFCKKNYNRDENGALNILKNTLNGVFKSKII

SEQ ID NO: 523 - protein, 577 aa, synthetic construct
  REGION 1..577: note = Synthetic
MVINVKRPPNIYYYKLYLNLVFDSDIVTFHDHIPIKFTLLTEFKTYNQQCDKVPFIPSIINKIIRYNANYNYSVKEIIKIFNVFRKKNLEFIPSLIKVCSKDLLCIPFWNAYTKLLSDKLYLPTLNDLVKTINKTLDNSWFKANEFVNNKNAYKLNFKKVNYEECILTKTRKINIYFNKSQKKYMRQIIGIYRYFYNRCVSFLNNYDKKTRISKYYINSKNKMSLIIVKVPETINPYSFISMRPILKQHIPTWLLKDFPEHLIDQALNEAFVRFKICLDRCIKTGKQFEFKYKQSKENVHTINLEKSMIHKTNSLFRNWKINDNYLFRNLKTSERFHMYNFKGSTLSYHRILKKYTLNLSYEEKTYKHYIPHRIGAGDPGQRTFLTIYSTDKVIEVGNNGCNKLFNICKEIDIIQSRLNCKEYYTQINNEKIIYKMNHNRRRNLKKALHNKIQYLKNLKTELHNKSIKYICDNYSTIILPPYEIQNMVGKLHSVIARGMYNLAYYTFREKLVAKSKEYNIKVLIKPEYYTTKTCGQCGILNHNIGTNKVFNCPICKLEMGRDQNAARNNLLRNIKYT

SEQ ID NO: 524 - protein, 324 aa, synthetic construct
  REGION 1..324: note = Synthetic
LLKDFPEHLIDQALKEAFTRFGICLTQCIETGKLFEFKYKNGKLPIQSINLEKEMIHRSNSLFMNWKIDDKYMFRNLKTSEKFSKFKFKGSSITYHKILNKFTLNLNYVYQTQKYNNSNRIGAIDPGQRVFATIFSTDKIIEIGNDACEKLFKICREIDIIQSRLNRKEYYIKENNEKKVFKMNHNRRRNLKRALHNKIKYIKSLRNELHNKCIKYICNNYSTIILPPYEIQNMVGKLHSKIARGMYSLAYYLFREKLIKKAKEYSIYVLIKPEYYTTKTCGRCGHLNHEIGNKKVFKCPSCNLEILRDHNAGRNILLRNIRFA

SEQ ID NO: 525 - protein, 565 aa, synthetic construct
  REGION 1..565: note = Synthetic
MINKKKLLCKMLNNHLKKKLYERKQDYFYEDLLCFKMIKYKQRNISLLNKIFSRINKNKTHINNNYSPSLVKCMSKDLSIKPFWDDNIKKLSDQLFMPTFDNLVTIENPFNTFNYKNWFDVTKQIPLNPIENDLFNYSNEDYEEKDITKCKKVKLNFNKEQRKYFNQIIGTYRYYYNRCVSYINNYNPLTRTTFFYIYPDKKTDIEKQKITIVINKKDSVYSNFTARKHLNKNNPEWLLKRFPVHLIDQAIFECCNRIKSCFSNLINNGRPFVLKYKTKKDLVQTINLEKIMIKKINAKKINLFSNFEINNKYLYRNIKLYESYPSNFGDSSISYHKLLKHYFINFNYKEKTTNSGSNKLCSIDQGIRTPFNIFSKDESITIGDNCFKVLLKKCKEIDIITSRMNSKSYYVKKDNITYYYKMNSKRKKNLRKALHRKINKVKNLKTELHNKTIKLLTDTYKCIILPPFNIQEMATGLTSKVSRSMYNMSFYQFKEKLKKKALSKNITVAEYSEPYTSKTCGRCGTINEELGNSKVFNCNNCKLIIDRDNNGARNIMLRNYQFIKK

SEQ ID NO: 526 - protein, 558 aa, synthetic construct
  REGION 1..558: note = Synthetic
MKKKKKPLINKNITSHYNNLFKQKINYYKIANETSYLLGYLMNTNKQYKLIVNSLIKNNLVSNDQIYPSIVKDFHTNIQIKPFWNNSIQKLSDKLFLPSNDNLCEANDYIKTFNANSWFNVEQYTGFNYKFYKLKTKVNSNDIKKIVKCKQIKLYLNENQRYYMKKIIGTYRYFYNRCVSYLNNYDKTTKTSWFCVEPDNEKTKIAIKVIDNPYNMINMRSQLKSNLPDWLLDKFPSHLIDQAFIEAFNRFKVCLDKCMKTGKPFQFTYKSKKELIHTINLEKVMINSKDNGLFVKWKIDNEYMFKNLNSSEKFNENNIIGSSLSYHKILKTFTLNLNYETLTTTSNSNQICAIDQGIKNPFTIYSPIKVVQIGNGVTRKLYKVCKEIDIIKSRIDKGTYYSKVIVNDIMQKEHYVVNSARKRSLRKALHKKIQYMKNLRNELHNKTIKYLCDTYKTIILPPFKTQEMVGNLTSDIARKMYTLSFYKFKQKLLNKAIEMGVKVHLLNEPFTSKTCGRCGNIKCNLGNADTYVCNKCNLVISRDFNGARNILLRNISQI

SEQ ID NO: 527 - protein, 562 aa, synthetic construct
  REGION 1..562: note = Synthetic
LAGNTKYRKKLRKIKVKIKKQFRDYLNNLLNYKNRLYQFTNRQFDYNDARWLHMNSQFLKTIKLMNQDNVLSENSIIPSIFKLYGGETIIRPFWNDKIQVLSDKLYLPDYNNLCQFEETPKQFQNTWFKSEFYMPTGNLNRLYKLKTKKKCDDFKALERVKKIKLYLTTKQKKYMKIIIGTYRYFYNRTIQVIKSFNKDTREAFYYIDRSKEETKITIKLLPNKYTTDFFYMRSLLKENEPNWILKNIPSHLISEAIHEAVKKYNECIDKYKKTKKPFKMSFKSKKDKLQTINLEKSMITYQGLFHNFKIDDEFLFRNIKKCENITKNHKGSTVTFNKDIDEFYLNATYEIIPKKQHNNKNICALDQNLFNFLALYSPNHVGIIGKKASNVLYKKCLEVDIIQSRINSTSYEEKNKIIIVNAEKRRSLKKAFYKKIEEIKNYKRELHDKSINYLINNYTTIIISPFEVQNMASKLLSQTARSMYNLSFYEFRMNLKEKCKEKNIKLIVKQEYYTSKTCTGCGHIKLNLKMSDREYNCDFCQLKIDRDFAGARNQILRNLSFA

SEQ ID NO: 528 - protein, 664 aa, synthetic construct
  REGION 1..664: note = Synthetic
MLIISNIDFMIRKKKKDINILESICNIYKNILEINKKDNESIKNINGIKKELDFCYFIDSKYVYKKSNLEFVNHFIDIDYTYYKFSKDEKKLCDIIHKYSNLDKDLIIFNYNLKKNINKQFNYFIIKYENFTTKFYREIDNYCLYENGILNYDDFFMLIKDSNCIPFWNEQCEKLSKEIFIPIDSNLVISTKPNTFNYDNWFGVEFKKIKNDNLNNKKLEIDNKERKFISQYKNKKTGEIKNIKKSHKIKIYFNPTQKIHIKRLFGIYRYFYNRTINYINNYDKKTNKTFYHIDSKNKKNKITINLDKEKNKFTVITIRKFIKNNYPKWIEEINFPSHLFDMAIKEAVSAYNGCMVKFNKYKIAFDLKLKTKKDKMQTMNLEKTMIHSKTNSLFYNLKNIDTDTDKDKDKDKDKYTFRNLKTSCKINKYLNIRDSSISWNQRTNEYYLNINFDNLEIPNKNILFNKKICAIDPGVKSFLSIYSDDSMNKIGIGIRDKIEKICRDIDIIISKQYRKKKGKYKYTSQKRRSLRKALHKKIKYLDNLKEELHNKSIKYLCDNYGKIIIPPFETQKMVSNIKLDSKTSRNLMCISYYKFLSKLKLRCIEYDMDLVIRPEYYTSKTCTKCGNIKHNLSNDDVYKCKQCGLKIDRDTNGARNILLRNLCN

SEQ ID NO: 529 - protein, 240 aa, synthetic construct
  REGION 1..240: note = Synthetic
LKTSCKFNKYSNICDSSITWNQRTNEYYLNFEDIEIPSNNILLNKKICSIDVGLKSFLTIYSDNSIDKIGIRDKIEKLCRDIDIIIIKQHHKKDGKYKYNYQKRSLRKVMHRKIKYLDNLKEELYNKSVKYLCNNYGKIIIPPFETQKMVTNIKLDSKTSRNLMCISYYKFLSKLKSRYIEYDIELVIRPEYYTLKTCTKCGNIKHDLKNADTYIYKNCNLKIDRDTNGARNILLRNLCN

SEQ ID NO: 530 - protein, 613 aa, synthetic construct
  REGION 1..613: note = Synthetic
MIKKKKKKSIEIIKKEIILLENNTNKNIEEKQSYLNLIKQILEYQIHNKLNIQKLLKLLKPNNQTIIYWIYKYSKNNNVYKKIIKNYHNYFTKSDINDIKYEIFIYYIKNQTAKLYWNDDIKKISDKIFLPIKENFKESKIPKLLKNTWFKCSVIKSTQLNTKKIECIKNRIHKPLVKKSIKIKLFLNKDQQKCIKDFFNCYRYFYNRAISYINNYNKKNQNTFIFTEPFNETTKINIDLQNVKNKFSYITMRKYIKNNKPKWMFSNMPSHMIDLAFKEASDNYSKCIKMYNTKNKKFKLHFKSNKKIQTMFIEKTAFSIKNNNVSIYKNYKNPYKIYTKNEKHKNFVFRDLKISEKIHKYDICDSTISYNKYTNEYYLNLTYNYNINKEKNKIKIEEKTKKILKTKKVVSNDPGDRTFATLYSDNKVIEIGKETKNIIYKLCKEIDILTSIISKKYYTKKMKDKTITKYTLTNKRKKRLKRALHLKYKKLKNKKVELHNKTVNYLITNYSRIIHPPFETSKMVSNLHAKVARSMNTLSFYEFKIKLRRKCEEYNIELIEEDEHYTSKTCCNCGKLNNKLGSKKIFECLNCKMIMKRDIVGSRGIMLKNNIWN

SEQ ID NO: 531 - protein, 562 aa, synthetic construct
  REGION 1..562: note = Synthetic
MKKYVRYKPSEIKLINIVKVKRKFIDKLNYMHTQKKLFINLNVGATESSPFAIKLRCMTTLKYFFRDYNEKIKSDYLYAKEFLTFMKNSKCVPFWTDSIKLLSDNLFLPIEESLTKTKNIFKNLWFTSEFYKAKENNNLQKLEVNSSIQNEIKITKTRQITLFLSEDQKIVFKNFLSAYRYVYNRTICCFSNYNKLTRSSFFFIDCKDVNSKVEIQFTEDQSVYNFYNLREILKDTIYPEWFKKINLYSHVMDSAIHEAVTNITTNFKQGRPLKMQMKTKKDQCQTLLIEKCYIKKNGIFPLYKYNDKYIFRNIRMKENIDKFNYTSSSITYHKILGTFTLNLGYTEEIKQTTQMNKKKKICAIDQGVREFVVTYSDTSVCKIGINPMSRIFTHCKEIDIIQSRMNKKEYYEIQNGNKVIYKVNSKRKRQLRRAMHRKIKKIKNLVKELHYQTANYLCKKYKRILLPSFETQEMARKLHSKTARAMMTLSFYKFKMIMNYKGKELNCEIIDCSEAYTSKTCTKCGNINYDLQMTDAIYKCSKCNLKIDRNFAGARNIALKNY

SEQ ID NO: 532 - protein, 523 aa, synthetic construct
  REGION 1..523: note = Synthetic
MKNKNKNIKNVDIFNKNIKKLNSEFFTCLNKFKFLFDFNDIFFPSSLNEIKKYTNIKPFWNSHISDISNNIFMPSFDNIKSYNTPYKLNNTWFNCSFFRAKHKQNPIIIDEHNNNNIKDEKIIKTKKFIIYPNQIQKHYLLQFFSCYRYFYNRTIEYFNNIDLNNLSSFYTFKDDDKNEKIELKFNNKNDMYNKYNLRKLLTQNKPKWIIDLKFDTHSIYNSIYEAIKNFNTNLKLNKKQKRIFKMKYKSKKDKNYIMNLDGRIWSKNYNILFSVYKINNSYIFRNLKLNVKHKIISNMNYKSFTIQYNTLLNKFYLLVSYEDNIKDLNNNKSVSIDPGVRTFITCYEQSNVFKIGEEANKEINKLCKEIDKIQSIKDKEENKRKKKRLKKAINKKYEKINNKIEELHNKTINYLVNNYKEIIIPPFETQEMVRTLKNKTSRELNNFKFYKFEEKLKSKCKEYKIRIINYNEAYTSKTCGTCGNIDLNLGNKEIYKCKNCGLIIDRDINGARNIMLKNKYGNC

SEQ ID NO: 533 - protein, 543 aa, synthetic construct
  REGION 1..543: note = Synthetic
MKKKKKKLSDFEDKPQLPLNQDLQYIYNYNNFIKKFTYISFNYRYKNDIEYLSAKKFISFFIDKNCIPFWNDNVAKMSAEIFLPHDENIEENKFLNFKFNKNKWFQSQFYNSKSETNKNISYKSNIYENNKNITKTRKIQFYPNKIQKSILKELFGIYRYYYNRTIQFMNNYNSKNKTSSYLVYINDNKSKKEFIDLPQNIYNMYKLRNYIKINEPKWINKIKLPSHEIDKAIKEAVDNIKTNFKKREKTGKNFIMKFKTKKDIYHTINIEKQTISKSNTIFSGIKIDNNYIFKKGIRLKEDVSKYNYGDSNISRDVKSNKYFLNLSYNEENIGRDINKYETCGIDPGIKNFITIYDESSVANIGIRCENKINKICKEIDIIRSHINKKKFINKNKELKMNANRRRNLRKAIRRKELYLKNVIDELHKQIIKYLTERYSRIIISPFESQKLDKILSRKQTRILKCLSHYKFKERLIIKAKEKNVKIDIREEYYTSITCTKCGNINYDLGNNDIYKCTDVRCKISLGRDYNGARNILLRNINNI

SEQ ID NO: 534 - protein, 389 aa, synthetic construct
  REGION 1..389: note = Synthetic
YKSVPTTRKIKIRLTNEQFKTLKIWAGICRKIFNVALDSYNKKETEFNELDHKFTLSTSEFLKKPENEFILQCPKEVREIMIQRLKISLSTNFDKLKDGSCKKFKIKFKTGKNYEQTIPLPKSGFSKKQTDGSINIYPLKGIGKLMLSRPNEDLGENWIQSNIIINKHGECWLCLTKDTEKTKNQLKTSFCSLDPGIRTFQTIYSPSGIVYKIGDKDIGRLLRLQHHLSKIRSKIDSNKSSRKKSILEKAYYKLNSKIKNLVSELHNKTINFLVKNFESVIIPDTNIKNMVTKKNRNLGKNNVKGMLLFSHYQFRTRLLMKSSIIENFNVIVNGEEYTTKTCGKCGLLNQTIGSKKIFKCSCGLLIDRDINGSRNILLKYLTERAYSIK

SEQ ID NO: 535 - protein, 345 aa, synthetic construct
  REGION 1..345: note = Synthetic
MGTRRFVYNKALESIKKGEKINFYALRNKLVTAKNNSDIKDWELETPKDIRAGAIRDMVKNYKTVFSQLKNRQIRRFKLGFCTRKDTPSIELPKSAIKLNNGLFIYKSYISDSIRVGKREKLNFNIDYDCRLQLKNNQWFLLVPIKTQVTKEDNRASYCSLDPGVRTFQTVYSEEMVMQIKIRKELIKKLQTKLDTFQSLRARKIISSCSYKRRMRKVYCRVNNLIDDLHHKTANFLTKTFKHIILPSFESQEMARKNKFNSLNRNLLQLKHFLFQQRLRSKCELRSTTLDICTEEYTSQTCGVCGKLTKVKGEDIFSCSHCNLVIDRDVNGARNIAIKRLNELF

SEQ ID NO: 536 - protein, 589 aa, synthetic construct
  REGION 1..589: note = Synthetic
MNMLTLKKQKNSFKLPLKLLESGIKKVKYVLLELHPDKEDIILRIYKTLWVGILLMIKNKKSVTVESLPPSKWMTLVDKQLFSNPNSLITSWLQMSVQELIGTGKVLKPFWTKQCTELSRKLWLPRETDSVVSHSNFWNGSSNKMELNSWFSMKKMENPVIKNSHTTFSPLFMSTPVDKWENDVIRTRKLRLYPTPDQKKIMKNWMSTRRYVYNKVLEKIKKENEKINFFDLRNKYVTSKDNPLVEEWETETPKDIRAGAVNDVVNNYKTSFSLLKNRQISGFNMSYQSKKKKEPSIEIPLSAIKATPEKVNRTEEEKEIVKSKIAEKKKVSDTKIKVKITKKDGGVFLYKNIMKTKIKISKRQLREDIIIESDCRLQIKNNNWYLIVPIKKKETKIDQKDEYCALDPGVRSFQTIYSEKSVEQIKINKEVIKNLQVKLDHFKSLRDKKMIRKSSFKKRERRIYNKVNNLIDELHHKTINYLTKQYKHIIIPSFESQDMVKSSKNRFLNRSLLQLKHYQFQQRLKSKCEIRRCHMEICTEEFTSKTCGSCGILNDVKDKDVYVCKCGIVIDRDVNGARNIFIKVLNKRK

SEQ ID NO: 537 - protein, 528 aa, synthetic construct
  REGION 1..528: note = Synthetic
MVKKKKLFTIELEHFVSGVQSVNRVLINRYPDKKHIISKKSTLILASLLLLRKRKRFISVEHMPQNKWVILSNDETMFDDDTILFKNWLSMICLTHSAKKKIFYPFWNNRCMEISNNIWLPTQNVIDSKSNSWTSQTIENTNLTYLSEYMFISREKCDEKGIRARKIRIYPNKTQSNKLKNWIGTSRYVYNQTLNYVRTKGNKELNFYQLRDRFVTAKNNSKLKEWEFLTPKDVRAGAIKDMVNAYKTAFSNLKRGNIGQFKINYRCKKKDRSIEIPKTAISYKDGSLFIYKKYLNSKIKKCKETIPEIRYDCRLQWERKQWYLIIPIDVECKDSGFDKTEACALDPGSRKFQTIYSENKVETVRIRKDQIKKLQNKLDKMKSLRDKKIISRKRYKNRENKIYNKLDHLIDDMHFKTINSLVKNYQVIFLPIFESQEIVRKNKYGNRNLLQLKHYRFRMRLAERCKIEKETRLVVCTEEYTSKTCTRCGLLNDVGSSEVYQCSNCDLIIDRDVNGARNIFIKCINEIM

SEQ ID NO: 538 - protein, 556 aa, synthetic construct
  REGION 1..556: note = Synthetic
MRNILTLKQQDKYLEFQLLPFVIGIKKVGLKLLGLHQDIDFTIKEIFSRLLMSILLLHRNKKYVIVGSAQKSKKMTWTDKSIFSSPNTLYTRLLQILALELTGKDKALKPFWNNRCLEVSQRLWLPTEIDYVGSDLNSSSLSLNKTELNLLFSTEKIMNPINKTLPTISFPSSTYTLVEKWEKEDIKTRIKKIRLYPSKQQRKTMIEWIGTTRYVYNRALQYLKETKEPCRFQTLRNKFVTKKNNPLVEDWEVRTPKDIRAGGLKDLEIAYKAAFSNLKQGNILKFDLRYRTRKKSFSISIPSSALKNIKNGIQIYPSYTDKKPIKTSKDKALLKLDFNHDCRLKLDNGKWYLFVPYDVNIQKLNTTGKCALDPGIRKFQTIYSENSVEIIRLRKEKLVKLQNKLSLLQSLRDKKSISKSHYIRGIRRVYFRIGNIIDDMHYKTINKLVSEYKTIFIPRFESQDIVRINKNRSSRRLCLTLEHYKFRNRLISKAEIVNSDVVVCTEEYTSKTCGKCGILNDIGSNEVYQCNTCGLRIDRDINGARNILIKCLRDID

SEQ ID NO: 539 - protein, 588 aa, synthetic construct
  REGION 1..588: note = Synthetic
MKILISENLSLLNKQENCSVLHLVPFVTGLYQVKSTIVLLHQEFESMIIKILREFLVAILILRKRKKLLTVELVQKNKWMTLNDKRIFSNPNCLIMSWLQTSLLGLTGKEKVFKPFWTNRCLEISQKLWLPIETDSVDLLLNSSNTSLQKTELNSLSWIEIMENQKIKNSQMTSCPSYMSIHVDKMEKEGIRTRKIRMYPDQKQQMILKEWLGTSRYVYNKSLAAVTKNKEKINFFELRNKYVSHKKRNGTINTNVENWELKTPKDIRAGAVKDMVNNYNSNFQKLKNRTVKHFKLIYRKKNSNYSIEIPKNIISIEKNKKKKRNKEGNKEENNTFYLHIYKQFITDGIKMSNDKCLKNNNLQMKHDCRLQYLKGKWFLCIPIDIQIDDKKPKYNSSCSLDPGVRKFQTVYSEDITIKIGIKKDMLKKLYKKLDNFQSLRSKKLITKSHYTRRINKTYFQIDNLINDIHYKTIDLLTKNFRTIFLPEFESQELVKKMKFKRCKRDLLCLKHFLFKQRLLQKCELKTFCKTIICTEEYTSKTCSRCGVLNNKLTTEEIFECNDCGLIIDRDINGARNIMIKIVNETLEK

SEQ ID NO: 540 - protein, 553 aa, synthetic construct
  REGION 1..553: note = Synthetic
MRWINTSNPRKQLQLQRSQVKLFVDGLKKVKSELLRRRPTDINIIKKTFSIVLVSIYLLSRKKEKKFVIAELAPKSNWMIWKDKSYILKINSLSTELLQTSALVLTGKEKVFKPFWNSLLKENSRRLWLPTKIDYQELPLNSSSGYLKRMEVKSSLLIEKKKEPQNKNLQKTFSPSLQSTLVSKWEEEDIRVKKIKLKPNQKQKKILKEWISTSRAIYNSGVDKINKDSKNANFRKLRDELVTAKRIGVKNENVKDWMKNTPKDIRADTLKELVSGFKGNITKLKKGSIKFFDLKHRIKKVPTYSIPIPKTAIKILDKKVKIFNRYIEDGIKIRDKKGFKIEHDCKIEWKYPNEFSLIIPYEGKFKEIKKEKDIVALDPGIRKFMTSFSDEEICEFHITEKVKKYNKEIDNIKSNNKGRKGILKRTFKITNIIKEFHYGVINYLTRNYKTILLPSFDSQEFFGKRRVINKKSARTLNNLSHFKFKERLRHRCNLTNTSLFIVDESFTSKTCTGCGVINNVGGSETYKCCSCNLVIDRDVNGARNIFIKNTKWD

SEQ ID NO: 541 - protein, 569 aa, synthetic construct
  REGION 1..569: note = Synthetic
MKLYHQGRHVKLWELPVRLLDAGIRKVRLKLLEVMVPKDYTKLVNSFQMAIVMLLLLRKKKVSVTVGYPQLNKKTIWKGKNHLCESNILTTRLFRILVVESIGNEKDYSPFWKKDSMENLKKLLSLTEIGYAGSRSDYSSKCSNSLIPNLWCSTMIQNVREKKNYTQTCLPSSMYTHVAKWEEESTKDASVVRAVKVRIHPNWTQQKTLKKWMGTTRFVYNKALAGILDGADKPNFQMLRNKYVTEKGNMIMPKWSFETPKDIRASAVNEVAMAYKTNFAKNKKNSNKKKFKVKYRTKRCTHQNISIPSSAITRSKNGINIYKKYGIGEILIDEKDKKKDLPIDMEVKIHKSFGNIWHLVIPYTMKIEKNMNPDKRICALDPGLRTFQTGFDTEGNSFKLGVNCYDKIRRRQELIDKLRSKLAKMKQLNDRVGYLKTKSRFNRSSFALSNAIDELHRQSIAWLTKNYDVIFLPSFDVQGMVGDCSWFNRWMLSLGHYKFKQRLIHKCEQRDKKLVIVDEYYTTKTCSGCGILNHTVGSSKVFDCQHCKLSLDRDVNASINILLKSLIQK

SEQ ID NO: 542 - protein, 431 aa, synthetic construct
  REGION 1..431: note = Synthetic
MTQRLKNESSQRIFSLSSTSIVADKWEEEGTRARKIRIFPTKSQIEALDSWIYTAREVYNKALEYAKKHSCYNFMFLRNRFVTKKVNKEILARVPGAKYTKTASTEKVLNPYVEEWECETPKDIRAESVKDIATAYKAAVSNVKRCNIKRFDLGFKSRKLGGHITLDSSSIKRDTDTTFTVYRRYIKTPIRAAETLPSTIKTSKLIKTKDGFWYICIPIKIHVEDRTDKNKGACALDPGVRTFQTLYSEEEVAEFTIDPSRLQTHDRRVCSIRNANLSFIGDKYYCGRKHASGKLNRMRKKARRLETKLTNQIKELHSKTINYITKKYKTIFLPSFESQELARKGKNRTLHRDILRLSHYKFKQALIDKCNLIKGCSVKIVSEAWTTKTCTKCGTINDPGSSKHYACSNCSLSMDRDVNAARNIFIRSITV

SEQ ID NO: 543 - protein, 413 aa, synthetic construct
  REGION 1..413: note = Synthetic
MFSLVDTTVKGGTTLIKEFQTTNLKKNQKNENLKNAKENKKNGTNNKANKVNYNSLFIPSSKTIKINPTKKQRKIINDWIASTRKVWNVCLHEINTNKTTKEFTLRDKFVIRKQMDEETIQKMEWTFRTPKRIREYAVKDIISCFKGGETRLKKKQIKKFKINYKEKNSNKQTISLPQEGSKIENNKLKVCSLFLHLEEKIENQDIKSNMRLTRIGLNYYVHIPSFISEKNKKESNEGLVGIDPGINIPFTYYSPQGEYGFIGMKLRKILEKKYKKIESIRKRTNNKAIIKKHENQIVNIIDDFHWKTIHWLLKKYNKIVIPSLYVRNCNSQIKKLQGDMRHCEFVNRLIYKSIEYKNVEIHHCKEHYTSMTCTNCGSLKTVKDKVVKCLDCKFQIHRDLSGARNMIIKHLTI

SEQ ID NO: 544 - protein, 503 aa, synthetic construct
  REGION 1..503: note = Synthetic
MKKCYQLEKKVLKPFWNTQCLEISKLLWYPENTDLQDLQDLQDLEHISSSKLSSVSSNQMMENSSFWITKMKNQKMKNWQTTYSLSSTSLTVDKWEKEDIELKSKMIRIYPTKKQTKILDDWRHTNRYVYNKTIAYTRNNPSEKINFQSFRNSLVTNTIKDVDDKRSQNPNVKLWEMKTPKEIRAYAVKDVVTAYKTAWSNLKNRNISHFKIGFRKKKSPTSSMTIQKQSIDFKNNYFYIYNTFFSGSGISIGKRTLKKIKNDFKDGFKVEHDSKIVYKHGKYYLLIPIDISKKDTNKKIKKNGVIALDPGTRTFMTGYSTSEVIECSRKADIFKKLKNKISILQENRKYKTIQKYYIRIGNLVDDLHWRTIKYLTDNYDEILLPSFESQELVKKNKNKKVREQLLNLKHYQFKRRLICKSNMLGNVKVYIVGEEYTSKTCGRCGALNNNLGSKEIFKCVKDDCNFKTGRDVNGARNILLKHLDVCPRSTQVGSTQDKFASKS

SEQ ID NO: 545 - protein, 365 aa, synthetic construct
  REGION 1..365: note = Synthetic
MKKIKLYPSQIQRKILIEWFNTSRYVYNKVLNSIINEDEKINKFELRNKYVTWNKGTNNNVKEFETNTPKVIRQESINDLCKAYKTCFSQLKSRMINKFNINFKTKKNKIQSIGIERSAKLDKKNKTIKLFKNIMKENHVFKIGKRQSKDKELKDLEIKNDCRICYDGYNFYLCIPVEEQKIENGLKNEIIALDPGTRTFMTGYDPDGNIIEYNRRDNLLNKLKDKLSLLQSKRKKRIKIVRQKIKNCVDELHWQTINNLTMNYKKVLLPHFESQKMSMKSHNKILNRDFNILSHYKFKQRLYYKSIVNGTKIYDVGEEYTTKTCTNCGNINNVGSDKEICCNKCSIIIERDYNGARNILLKHLE

SEQ ID NO: 546 - protein, 410 aa, synthetic construct
  REGION 1..410: note = Synthetic
LDEKTFESEETELANDLLSITTSSVVNNWEKDVIKNLKVRIYPTPTQRKIFKEWFGTTRYVYNRVLDAFENKGEKNNAYELRNKYVTSKNNSNVNEWEKRTPMNVRANTVLKLSSNYKSAFSNLKNGNIVRFKMRFKSKKDRSQALFLPKSSIEMKNGSMTIGKHSISKFWSSERKGDKYAFSKFKLKGKTKKRDINIDSQCTLTYDGLYYHVLIPKKTRPKKVQKRCENTIVALDPGLRKFQTGFSQSEIFTVERTAMLKKYNKRISYLHGKFQRNNTRKILKTYRRSANIVSDIHWKLITYLTDNYEHVLIPKFESQELQKITMSKHSNRLYDTYKHYLFKQRLIEKSKEKINTRVYMVNEAYTSVTCTNCGTINAKTRSEMSTCKTCKLLSDRDIRGSRNIFIKYVQ

SEQ ID NO: 547 - protein, 621 aa, synthetic construct
  REGION 1..621: note = Synthetic
MLKKKKKLNISQLRKLTNSLAYIKTRFVSLVMNKRFNAIKHLEDKEDLINLIWKRCVILFLLIQTQPRQILFTLELVPKNNWMTFLDKLNTSNQKILDILHIHLFQILVLELISNEKDFKPFWTPVYKKLSEKLLLPTEIDFPDLVSNLLNVSSQKPVGQSKYSMMTVTKAQNKNLQKTYYQLSTSTVVNKWGKEVINQPMLKNLKIQLKPTLIQKKIFNEWIKTSNYVYNKTIACINKGDKVNFINLRDKCVTNQTKKTNSEYTVLINNIKDLNKNIKYENEPSQLDNLKKQLIIEKNNLKKIKFENNSFVHKWELKTPKAIRDGAVRDVCKANDTGWSNLKAGNIKHFKLGFRKMQKCQKSFVLPHSLIKLINGEFIMAPNFLKEHCKIRIGKRTLKKHGKIEINNDCRIKHERNKYWIFIPVPITIVSPTTVPVQRYCGIDPGVRTFLTVFNNNEVVEYNQNKILLKKLNKKIDILKLKRTKKKCKYKIEERKENIINELHWKSINDILKRNDYVFYGDIKSHDIVKKSSNRFLNRNINDLKFYKFKERLMYKASILNKRVFNVNEMYTTKTCSTCGYLNNVHKKEIYDCENDLCRNTLLRDISAAKNILMKGIIKFL

SEQ ID NO: 548 - protein, 411 aa, synthetic construct
  REGION 1..411: note = Synthetic
LKPTIHQRKIFNEWIKTSNYVYNKSIACINNGDKVNFINLRDKCVTSKTKKFNTDYSILTENIRILNKQIKEQENQEQLIILNKQLTVETAKRKLIKFENNLFVQEWESRTPKAIRDGAVRDVCKADVTGWSNLKAGNIKHFKLGFRKITKNKKSLVLPHSLVTNKCGHLVIAPDFLKDESILKMGKRTLKKHKNIEINNDCRLVHERNKYWIFIPIPTILKSKVDSHNYCGIDPGVRTFLTSFGNNGVVEYTQNKTLLKKLNKRIDLLNSRRTKRRNKYKLEQRKENVINEIHWKSINDILKRNDYVFYGDIKSHDIVKKSSNKFLNRNINDLKFYKFKERLLYKANVLNKRVFNVNEMYTTKTCSSCGHLNNVGKKEIYRCEMIKCNNTLLRDVSAAKNILMKGIVKFL

SEQ ID NO: 549 - protein, 421 aa, synthetic construct
  REGION 1..421: note = Synthetic
MFNEWFNTTNYIYNKTIETIKNGHKKNPISLRNLLVTDETRTKNILYNVNLKKLKELNNDKIILEKKINEKNKRINSDFLFIKEQLINDMIKDLKTKQKNIPLEKNNNINTWELKTPKNIREGAVNDVCKSYKTGFTNLKNGNIKFFNIKYRKNNKQEKSFLISKDMIKNKNGIIEIAPSYFKKEGISCKFKMGKRTIKKNKDLKINNDCRIVKQCENYYLIVPVPMIFEEKKTPLNYCGIDPGVRTFMTCFNNNGYSEYDYDINYLKKLDNKISLLKNKRINKRIKKRKLSKIERKKDHLIDQLHWITINDLLKKNDILFYGDIKSHDVVKNGKYKTLNRDMNNLKFFKFKQRLIFKAFEKQKMIFEVKEPYTTKTCSFCGVLNNPGKSKIYECHSCNKKMGRDINASKNMLLKGIINYL

SEQ ID NO: 550 - protein, 511 aa, synthetic construct
  REGION 1..511: note = Synthetic
MKTGSKPGTKSKSKYKPFWNATCTKLSENLFALPNTGLDPKHNPFIDLNDYKKRLDAKINAVGNETNLKTVMLRLNTTDEQVKTLNKWFDTANHVYNKAIECIESRGKGDSISKFSVRNKLVTDDTITLTPVYFALEKEISDIRKLRNKLDKENVNELKWHTYYTNKIAALSASKKAIKPEKNPNVQSWELETPKDIRLGEVFSACSAYKTGFTQIKNKTITHFKMAYRKKTRHYKSITVPKVFIKIVDSKFSIYGSYFSSKINGLFSVGKYALKDVKELVISHDCEIVKKRDEYWLHVPVKVETSNKPVKYDTYCGIDPGVRTAITTFGNNGFTEIEHDINKLTSLNRKINALKQRRMGPLLRGKRTRTRRRNIAKYEKRKNNYITNFHWHTIKTLLSNNDCIFYGDIKSHDIVKDGINATLNRDLNDLKFYQFKQRLLFKAKCLNKTVFEVDEPYTTKTCSFCGELNDPGTSKIYECSKCNRSIGRDINAAKNILIKGILENLLTPKTK

SEQ ID NO: 551 - protein, 653 aa, synthetic construct
  REGION 1..653: note = Synthetic
MTTPTKKKTTSLLQCEKLLCSLLCTPILFVSMLTRVKLSVSKLLPDKEESIKETCRNSVILLVLSFKFPKIRNRVLTLYTLASPLKNNWKTFIDKLNMSSNADLNMLHTLLFVMLLQELTLIEKDSKKFWTPAYKELSGNLLSPTKIDFAGLRSTSYSALYRKAEEKSPFWTTTSIKVRNKNLQRTYCPSSICSLIPKWENGAEEQHALKTLAVKLTPTSQQRKMLDEWLNTSRYVYNKTVQCIRAGDSVNFYNLRDKLVTADTKKHNAEYIELEQLKETKRTLQKEWNVLNAEIKEEKTKEYQYEITKINTRIEQCKRNLETVKKTLKAEKNKNIQEWELETPKYIRAAAVDDVCNAHKTALSNLKAGNIKHFNINYKRKTNARQCMLLPKSAIKNNEGELTIFKQFLKCSNSKFSMGKRTKKKYKDLVIEHDCRIVKDKNVYWLFIPVPLEMKLSKAPSEATVKYCGVDPGIRTLFTSFERDGCTEYNYKENLIRKLDEKIRYMKSVRCNKRRRVRKRKINKIETRKSNLINELHWKSINHLLKSNDVIFFGDIKSHSIVKGGKNRTLNRDMNNIKFYQLKQRLQHKAAERCKKLYFIREEYTTKTCSFCGEYNDPKASKEYSCSACKIIVGRDVNAAKNILMKGIFNLHK

SEQ ID NO: 552 - protein, 624 aa, synthetic construct
  REGION 1..624: note = Synthetic
MYYIGCRMNTSLSELLRNSQDCTLIRYANLLIITKYNLINLLQDKECFINCLCKRSVVLLLLAYKFPKIRNNLLFMYESLPKNNMMTFLDNLRSSNPENLNMLTIKLSKMLLLELISREKDYKPFWTPAYKALSEKLWLPTEIDSHVSDLNSLSTSLSTPVVHSPLLTIRKIKVQNRNSPRTSCPSFTSTAVNKWEKESIPPTMKAIKIKLKINQEKKNLFNQWFKSSNFSYNKAVSAIRTGHAINEFSLRDKFVTANTKKTNPEYQRMETQIKTLRQEKKQTKDTSIDEKIKVIQSELKEKKKEMKSTKNEGVYEWELETPKAVRSESIRDVCKAYKTLFTMLKQGNIKRFQVGFRRRTNPNQCMGIPKSMIENKNGHIIIGPSYFDTVDKAKISMGKKTMKHYKNIEINHDCRMVKKHNEYWLFVPVPIEPCTEKRSWSTYSGIDPGIRTFMTTFGTNGCNEYEHNESKIKNVDIKIKRMKACKKYVRKQSLWKQEQRKEHYIDEIHWKTIQNLLSCNDVLFYGDIKSHNIVRGNKNRTLNRDTNNLKFYKFKERLLFKASEQGKIVICTKEHYTTKTCSFCGTMNEPGASKVYHCSNCKRKVGRDVNAAKNILMKELIKHV

SEQ ID NO: 553 - protein, 648 aa, synthetic construct
  REGION 1..648: note = Synthetic
MESKKKENIYPLKKQLKLLDCQFNLLVNIAIRSRLNALKHHQEDIVELINKTWKNFYLLVLLLKKFPKIQKITLSMLGSLPKNNWMTFLDKLNTFKKEELNMLHIPLLQILLQELTLKEKAFKPFWTPAYKDLSERLLSPIEIGYPDSDSTFSNLLSKKQEETSSFLMMKKINLQNKNSLKTYYQLSTSTVANKWEKENIKLKSTLKALKIKLRTTKQQRTILDEWIDTSRYVYNKTIECINNKHPINFNSLRDKLVTKDTKKNNKEYKDYTIELDRLNSEKKDLKKQIQLNKKNIEKYNETVIQLGKQEQLIMDKKKSRISMAKQLSYQKNEDINDWECNTHKDVRSGAIQDICDAYKVAFTNLRDGNIKYFKMKYKKKTEPSKCIRLAKNMVKNKNGIIEISPEYFKESKNFQMGKKTIKKYKDLKIEHDTRIIKQKGEYWLIVPIPIEKSSTNSSVDNYCGIDPGVRTFMTTFGNNNCMEYKEDKNKLSKINNKRTLLLDKLHNVIKSKRVYKKKLNKLEIRKENLLNEMHWKVINDVLNRNDVIFYGNIKSHDIVKNNKNRNLNRNTNDLKFFKFKERFLFKAYEKNKKIFLVNEAFTTQTCSCCGFHYKHGSSKIYECKACKKVMDRDINASKNILMKGIMNL

SEQ ID NO: 554 - protein, 665 aa, synthetic construct
  REGION 1..665: note = Synthetic
MIKSVEALERKRKKDLLLWEKLLDLPDWKFKQCGRWLTKHLSYAIKHLPDKEGLIFTVFRNSVAMLYMIKKSKLFKNKILYMLGSRPKSKWTTFLDKLNTSIVLQPNFLVIELLQILLLDLISREKVYLPFWKPVCKDLSERLLLPTVTDSAGLDLISSSNWLPKQVEKLRSLTILTTKHLNKNLQKISYPLSMSSLVDKWASEAISPVKLKTLKIKIYPTLEQKKKLDEFIDTSRYVYNRTLEHINNGHKINFMDLRDLLVTDHTKKYYPEYKEYDESISQLKRLKVDASTETIKDINEQIKTINTQRRNAMKKFKYKKNEMIHSFEIKTPKNIRANAVKQCCDAHKSGFSNLKNGNIKHFHMNYKKKKDSIQTIELSPELISIKDNTIKICPGIFDNPILKIDKHNNKLKRKLKDLQIENNVDIQRKTSGSEVGYYIFICVKTNPVRTKNLVLNRVCGVDPGVRTLATVYSHSMSNHETNISEYKALNKKNVDLLAKYNKKIDSLKRNKSIPKLKKNKNRKNLSKPKRIRKKHINKLDKKKVDYTNRLHWEFINDIVSKNDIIYFGDIKSHGIVKNGYNHTLNRCFNDLKFHVLKQRLIYKASIQGKQVILVPEHYTTKTCSCCGLINETVGSKHVFNCSKCNLKTGRDMNASKNMMLKGLFL

SEQ ID NO: 555 - protein, 678 aa, synthetic construct
  REGION 1..678: note = Synthetic
MVKKKNISVLERLQHLQGLESRPLEKWLIHRKLHAIKHLQDTESLVEQVFSICVEKIQLMETNPESIFYILESPLKSNWTTFLDKLNTSSDPNILTILLFKTLVQELTSNEKEYKPFWTTAYEELSEKLWSPTETGLADLAMTSSKALSTRQVEKLHCLTSQKINLRNRNLQMTSYPLSISLVADKWEEEITENPVKFKTLAVKVQMSKQQKQIYKEQYGCFRYVHNQTLDRVKKHGEEPNFQDLRNLLVTKDTKMHSNTYKYHMLCIQTAKRKEKAIAFKIQEEEKEFKKRISKDKQLSNEEKKILKNSFKTPVSYAVDASAVFLNYTTEITTWIQDMLLRKTNQEVLVEEEEALLEKALKPIPSRKNPYVSNWEREFHKDLRSNAVKKVCESYKTAIANFKAGNIKSFDIKYMSSKEPRKCIELASGQLSIKNKNIHIPLFKGCPTLKVSKKMAKKLNGIQIKNNCDFVCQKNSYWILIPVKIKLSKLDIEKPRYCGVDPGIVKIATTFGNYGITEYTHNRELLQRYNLKLTFLKTKRTLGRVRKKQLNKIEKKKIDYTNQLHWKLIKSLLDENDVVFFGDIKSHDIVKDGNNSSLNQEFNDLKFYRLKQRLIYKSKTRGKKVILVNEKYTSMTCSICGNLKTMTDRIYNCKGCKTTVDRDINAAKNILMRGILCM

SEQ ID NO: 556 - protein, 280 aa, synthetic construct
  REGION 1..280: note = Synthetic
MKFKKKKAIRICAELASAGICMENSQIKINPTKLGEHSMFRISERNIKKYKDLKIDNNCDLMKIKSEYFIYVAVPVAKEPLKIPETFCGIDPGLRTFMTVYSNHGIYEYNQCDEPRLQLNLKINLLKNRKCLKKKHKKSRVKKCAISKREERRSNLTDELHWTVINDLVRKNDLILYGDIKSHDIVKDGKNKFNNKRFNDTKFYVFKQRLMYKALRSGKKVIPVCERYTTKGCSKCGNVKHDVGSNKTYYCDILECAFVHDRDINSSKNIMMKGMIPITG

SEQ ID NO: 557 - protein, 657 aa, synthetic construct
  REGION 1..657: note = Synthetic
MTEEEKEEKKQQRNLLLLEKHLSCQGLKFKRFVDLLILRKSQALQHHLVTEELTEKVFNQCLIMVILMIKSKLARKRIFSTLVFQPKNKWMTFLDKLSLSKDQNILPILLFQILVQELISKEKACKHYWTPVYKKESEKWSLPIVTDCAGLDLNLLKVSSKKQVEKSQSLVLKTMKLTNQKNLQMTCSQLLPSLVADKWEEEVIKTEKAKQKTIKIKIYPSNQQKTALNEIFSVYNYVYNKTNELIKNKNCSYLKWMDLRDRLVTCDTKKNDLEYIKNSELKALVKKQFDLIYEMEEEKEIDSLALPSFMKREIIESIEANIRQSNKSVVSKENMEIKDFEKKIHKNIRADAVKVCCEMYKSAVSNLRNGSIKYFNIAYKKKSSPSKCFGGIDTNMIKFKNQGISLMPKKLGKDLCDFKISKKSWSKYSKKDISGECKVFYQKGNYFIGLTLLTKEKNTGKTDKVCGIDPGLRSFCTIYDKQNILEINQNRAYLKALNNKIQILKAKRLRPRNEIDVLKKRRQKRHFNKIEKKKIDYTNSVHWATINFLLKNYDTILLGDIKSHDIVKKGFNKSNNQEFNDLKFYVFKQRLIYKAGLANKFIKLVNEFNTTKCCSNCGNLNHCVGSSEIYNCNKCNLTCGRDSNAAKNILLKGILCK

SEQ ID NO: 558 - protein, 561 aa, synthetic construct
  REGION 1..561: note = Synthetic
MTMLKLDKLPISLDSHHKLFVCTLIKAYLKDIKLQVELECLITQVYKRTLIVFVMHKKKMLNKNVSSMLESVQKNNKMIWNDNSSTLDLSIQLCQILIQVSTLRKRTLKPFWTSAYNELSKKLWLPTKIDYVDLPMTCSSMLSIRQVERVDDCQASRNLLPSRIVDKWESENIEKDIVKCRKIRLKVTDSNRSALDEWFNTSRYVYNKTVCEIKNGAKVNFQDLRNKLVTKERDKIRNKRVKDWETRTPKEVRATAVKDVCNAYKTSMANLKAKNIKHFDLSYKKKTSFDQSIGIQKQSIKNKNGNLEIYSRILKPIKLGKRSKNLKVGNCDARLVKQKNRYFICVPMKCKTEKNKDYKRVVGIDPGVRKFMTIYSEEKISEYRQKRDLLKRLNAKIDKLRMERIRPLRRGERVKARKKSINKVEIRKSDLIDELHWKTIREITKENDVVCYGDIKSHDIVKRYNNNNLNREIMDLKLYKFKERLRNKCIEYNKVLIEVDESYTSKTCTNCGVINDVKDSERYECKSCEIKIDRDLNGARNIMLKGIQSLPSAFLGGEKNK

SEQ ID NO: 559 - protein, 572 aa, synthetic construct
  REGION 1..572: note = Synthetic
MSIRELHVNFTKYTQTHFVAGLNKIKSILYGLPQIAECIRLKCIRMQCAMLIMLLKNKKYIIVEYPQSNKKMISLVKSNLCNLNTLNILLFKILVQESIGNVKVFKPFWNSQCQINSRKLWLPTETDYADSHSNSFNGSWKKIKSNSWFSMKEFNPQNRNLLKTFYQSSTSSLVDKWEKDVIKKRKRKRKQKKVKCCKKIRFLPTEEQQKYLREWNNTARYTYNKTIHKINNEKQKINFYGLRDKLVPKKVIPKNKMWITNTPKEIRANAVKEVVTAYKACFSNLKNNNIKYFKMSYRSKKTQTQESISVPKQAIKKLDDGTAFKLYSRTLKSSIKLHHETILENFNSDIRIIHIKKCNLWYLCVPYDYNINSLTEIQGGNSNIVSIDPGTKTFLTLYDYNGHVYKLGNDDIKIKLIPMYKKIDKLKSLTTKRCSKTKYNIKRRIRKQIYKFKNYIQEIHYKSINFLLSRYSTILIPHLVDKRIIKNMFSSSNRRNLLSWNHSKFLTILEHQAKKYNKNLVVASEEYTSKTCGNCGNINYYLGNKDIYCCNSCKVKIDRDINGARNILLKNL

SEQ ID NO: 560 - protein, 379 aa, synthetic construct
  REGION 1..379: note = Synthetic
MEKVKIKHKTLKIKIYPTNKQKKVLNEWSNTFRYIANVTIEKREKNKEKNNFFDLRNKIVTAKNVPEDMKWQLKVPKEIRANAVKEVVSNYKTSFSLLKKKKIKYFKMKYRKKKKGHRYLILSKSGVSKKDNTHLNIFPKTFGKKSLKMRKDKAFQNVTKILDGIKVKNNYIFLPVEIIEVQNHARAKYDICALDPGVKTFQTMFSNEEVIKFGDQSKILKMYELIDDYKSIQTKVKKYFKNKLRKRILFLNEKIRNKVDEIHWKTINYLTNNYQNILLPKFETQKMTKNLHRKVNRKMMFWSHYKFKQRLIWKCNLKNRNIKIVNESYTSKTCTNCGWLNHNLSNKDYFKCNECCIEIDRDTNGARNILLKELAGYES

SEQ ID NO: 561 - protein, 604 aa, synthetic construct
  REGION 1..604: note = Synthetic
MSHQKKQENIIQSMIVQLEDGQEKELLSVKEQKEVITDIVFQSLTMKNLKSKKISDSTLFMQESLLKNKKKILKDKPDISNQCLKTIPLLKTLDQDLIIKERGFKPFWNNFSKEISKELWLPTKIGLQDLDLTSSNGYLNNSEQYWNQLTEQQNPEKKNCSEMLWKCSQFLQQDITEVENTKIRTMKIRIYPNKEQKQHFKHCFGVSRYFYNKSIDEINKRYKDRKDQFNNKNTCIHCNNKKEENSWSCSKHLKKEIKWNLKITLPSIRPIVMSSDENVSNNMLWQKEVAFDTRQMAINDAVKSYVSSVSLLKMNKIKKFDLKYKTKKNKYQIFWVNYKAITKDYKLFTRRLKSKSKLRIRKKQRVLLSKLIPNGIDSFCKIQKSGKNIYHLIISYEKKDIINKNKKDSFISLDPGERIFQSGYSSDNKCYQFGIKQMEQIKRIHKKIDNLKSLRSTNFCSKTKNKNYKNKIDQYDYKVLNIVNNLHNQVSSFLSKKYKTIIIGKLNTHKILKSCGLNNKINRLLQVQSHYKFRTKLNLLCKDNKSNLIVQEEQFTTKTCGNCGCINENVGSNKIFRCDKCNLIADRDFHAARNILIKFLTLNQ

SEQ ID NO: 562 - protein, 419 aa, synthetic construct
  REGION 1..419: note = Synthetic
MKIRIYPNKEQKQHFKHCFGVSRYFYNKSIDEINKRYKDRKDQFNNKNTCIHCNNKKEENSWSCSKHLKKEIKWNLKITLPSIRPIVMSSDENVSNNMLWQKEVAFDTRQMAINDAVKSYVSSVSLLKMNKIKKFDLKYKTKKNKYQIFWVNYKAITKDYKLFTRRLKSKSKLRIRKKQRVLLSKLIPNGIDSFCKIQKSGKNIYHLIISYEKKDIINKNKKDSFISLDPGERIFQSGYSSDNKCYQFGIKQMEQIKRIHKKIDNLKSLRSTNFCSKTKNKNYKNKIDQYDYKVLNIVNNLHNQVSSFLSKKYKTIIIGKLNTHKILKSCGLNNKINRLLQVQSHYKFRTKLNLLCKDNKSNLIVQEEQFTTKTCGNCGCINENVGSNKIFRCDKCNLIADRDFHAARNILIKFLTLNQ

SEQ ID NO: 563 - protein, 338 aa, synthetic construct
  REGION 1..338: note = Synthetic
MVNNKDLTEDIMWQKEIPYDTRQLAIKEAVTAYHSNLEKMKRGSIDKFELHFKTKNNPVNLFHINDRSCKVQIKNNKKYLSLFPVILQNNSILRTRTRVSKLIPNSIDKDLKMTKDHGKYYIIITTEKDRNKELTKNRENIALDPGVRAFQTGYSDEGVALEFGKRHQDNLKKLHNKLDALRSVRDKTKLKITKRNLKKKIRSVYSKVENVVKDLHYESANILAKNFSRIFLPTFETQKMLIASCICSKTKRMMQSLSHYRFKQRLAHVCYRYGTTLHVVDESFTTKTCGKCGCLNNVGGDKIYKCSSCNYVCHRDIHGARNIFIKVVTEQWAATRAQ

SEQ ID NO: 564 - protein, 410 aa, synthetic construct
  REGION 1..410: note = Synthetic
VKLRIYPNKTQKILFKKCLNVSRMIYNRAIDEINNRYVNKQFEFENSKTCIFCKLLKVDNLYTCIKHKNKKLPWKLNITLPSIRKSVMLSDKQLKGTSEEYLSEIPYDTRQLIIKDAITMFKSASTNKLHGNITSFKLKHKEKSNRSIFWIDDKALKIINNKVTIFVKRLKNKSKIRLSAPNIKKLPISNTADCKILFDKGAYYLVLSTNTKNNIIYNKKEHIALDPGIRTFQTCYDPLGNILEFGKVDASKIKKIYTRIDYLKSLLNKVKNKTCKSISSRILKLNKHINGIVSNLHNQCASFLAKNYKHILLPSFNTSVMLRSKNLYKSVKRLMSSFSFYKFKEKLSYLCFKYNSYLYIVDESYTSKLCGNCGKLNNIGCSKIYTCQCGITLDRDINGARNILLQYLYI

SEQ ID NO: 565 - protein, 511 aa, synthetic construct
  REGION 1..511: note = Synthetic
VNSQTTSWKLLQSLQQDTTEVESIKKARVPKKIKIDELLTSEVKDNKQILRARKFRIKFLDKRTISFLRLCFEAYDCFYNLTVKEINKRYNDRKQEFINSLTCINNSCKNNKSENSWHCKEHLNNIIHWKLNISTIELRNVIPIDKDTMLKIDCLKKFINIPYDLKNEAIEHAVIAYKTNVSSVINGSKKHFELKEKEIKQAFENKQFELPFDFLDIKDSYINICKNGILAEYRESIEFERKEHKRKKELITNNWCQLSLTKKSMKVINEQYTKDKCFIKIYKSKDNKYYLIMTKNNKKETYENKRHIVSLDPGVRTFQTCYDPSGLIVEAGTIIKTKLETIIKQIDKHEVIINDKLNKSKRRKNYKKKKIKKYKKIINIVDNMHNQLSSYLTKNYNNILVPQLPVKKLVRKWDKKNDEPTLVKRVINSITSRIMNYLSFDKFLTKLKSLCSLRNTKLFIVDEIYTSKTCGCCGYIKSDLGSSKTYKCNDCKIEIDRDYNGSRNILLKHLI

SEQ ID NO: 566 - protein, 593 aa, synthetic construct
  REGION 1..593: note = Synthetic
MVLPSQLFGSGQKMEEFLSEEMKTAIIGTVSTLHQVSPLTIIQTLTSSTPESPLKNNNLILNDSAASSNSNIPTTESLQILDQELILTDQVLKPFWKVSSKNASDMLWLRTKTDSPDLALISSHGFSNNLERNLQVWQMKTVPKIKTRLKNLLKTSWRSLQSFPPATMVEENILCTRKVRFYPNCAQKQLFDKCFTAHRLCYNNAIQEINKRYTDRKAEFAEAKTCIFKNCSCSKFEKGYFCEAHKNKQIAWNLNIVRGSIRNASMKTNEDLNINEMWLKDVPFDTRGHGVQDAVSAYKTCVANLKNGHINHFELRYINCHKSSKIFWVNKKAVSPGFKIFTQRLKHQSALRFKASDKQWLSTTFSEGRFNNDFKIQRECGKYYLLINFEKEIVTRQKSCMVAALDPGIRTFQTMYSESGLIGKFGESTTHQIDALYQKIDRLRSVQSKVIGKKCHNIRKRVLGLQKKIRDIVTNLHNQTSSYLSKNYEKILLPEFGTSKLVQNSPLAKCVKRKMMTYRFYDFKQKLNHQCNTYNTKLIIVKEDFTTMTCTRCGVLNKTIKGSKVFNCSACDLTIERDIGGSRNVLIKTITEC

SEQ ID NO: 567 - protein, 501 aa, synthetic construct
  REGION 1..501: note = Synthetic
MSKKFWIESISPKISKKLWIPSESHKGPPLHNSEHHEQFLHFWDHTSSSRAAKYFNTNDWEPAVLPTDRIIARKIRVYPNHQQKRVFKRLFDAHRFFYNKAVEILNKHFDGLKKKFITQNNCAFCKKLKSSNDSFTCSKHADKKINWTKGINASYLRKCIIPKHLTKKTLWQQEIPYDTKDLAIKDAITAYKSCTTNLNNGNIKDFTMWFKSRKNPRQIFWIDNRAINTENKKLRIFPTRIKKPIYVRKRQRNKLPPMTQTTDGQKCIKHDAKFLYDRGAYYFVFTINEEATEAIKPKYSIVSLDPGVRTFQTCYSPSGIAFKTSNKQQYILKSLNAKLEELRSERDKSTNPVQYRRRRKKCLKIERKKSNIAENIRNQLATYLTKNYGTIVIPKFSTSQLQQNPDLSSITKKTMTDMSHYKFRMKLADLCKRDGRDLQIVEEHYTSQTCGKCGAINKIGKDIVYKCNKCSYEMDRDMNGARNILLKTLTEAKVKENKESD

SEQ ID NO: 568 - protein, 294 aa, synthetic construct
  REGION 1..294: note = Synthetic
MWFKSRKNPRQIFWIDNRAINTENKKLRIFPTRIKKPIYVRKRQRNKLPPMTQTTDGQKCIKHDAKFLYDRGAYYFVFTINEEATEAIKPKYSIVSLDPGVRTFQTCYSPSGIAFKTSNKQQYILKSLNAKLEELRSERDKSTNPVQYRRRRKKCLKIERKKSNIAENIRNQLATYLTKNYGTIVIPKFSTSQLQQNPDLSSITKKTMTDMSHYKFRMKLADLCKRDGRDLQIVEEHYTSQTCGKCGAINKIGKDIVYKCNKCSYEMDRDMNGARNILLKTLTEAKVKENKESD

SEQ ID NO: 569 - protein, 425 aa, synthetic construct
  REGION 1..425: note = Synthetic
VEREVIKGRPITRKVHIYPNQQQKKQFRQYFGTHRHFYNETVKYINEQYAIRKQEFNASPTCILCTNPKVNNNEWLCLTHKASKKVKIPWNISLELSSVRSNVMKLNRELSDDEMWQKEIPFSTKEYGIIEALTAFKSAITNKKCGNIDRFDVGLKSFRDIRKTFLVDKRAISNKSGNLVIFKTKMPDAIKVTKRNKKLLPEVFDFNCQVLYDKKQYFLLVPSDEPIQTKKPSKYESIALDPGVRTFQTGYSAEGVLLKSGEAVSAELEKLYDRLDCLKSQKSKNKGIKKNKLKDRIWKLQTKIKNKINNLHNQFGNFLTTNFENILLPEFGTSKMQESDILPSETKRRMAALSHSAFKAKLKGLCCRDGRQLYIVNECYTTQTCGVCGTLNQIGGSKVYSCKCGYEMDRDSHSARNILLKHIRE

SEQ ID NO: 570 - protein, 468 aa, synthetic construct
  REGION 1..468: note = Synthetic
MNINKNYGYLLGDLESIIDRRNFETNKENKTSSGEYIYDNRTRLLSYITPSETFDYQTNGLVGKYNIKAKDSITISALGKVEISNYELPSEYIQCARKLRIYPTESDKTKITKLFHISNAFYNAAIDGIVKKKIFSESSKKVIREECKVSNDVCETIHINAKDAYYDTRDLATLYAVANYKAMLTNKSNGNIKHFHLSNKHSMQVVHFSEKNARFKKGKLCIHDMKINLRRCDAEWLAEHRIKQQVIIKKSKSKYYLIVPFMRKNQDNGKKSICAIDPGNRTLATYYSPDEIGKLGDNILDLIKPIRNKIDHLKKLRNSDMVKSNTRYGMKQRIAKLNTKITNIIDYHQWKFANYLTKHFRLIFIPRLANCVSKQNGKFTRELRTKINRDTRSLCHSKFIDKLTHLGNVYGCKVVETKEYYTTMTCSNCGRVNRKVGGNKVFYCKGCKFTIDRDVNGAKNIWLRSLTN

SEQ ID NO: 571 - protein, 421 aa, synthetic construct
  REGION 1..421: note = Synthetic
MLLQKKEIDKLDKKKVNRYWKPNPYYEQLQNKIPIKTKIPIPKPTDYINSRKIRIYPSTEQKNLFNKFLGANRHFFNKTNHYIKEEVDDKKRYNHYYMRQKMFEDQQHWYNEIPYDNKSLAVKQCITAYKSAFENQKQGHIDHFDIGFLSKKQTTQVCYLRKNAYNFNKNYIFPRTLNKHKKLRIKEFLKETTCSDLVLLKIKPGIWYLCIPYKDNTSTHSPSIYKNVFIDPGIRTFLTCYNPENNTYKKLGNHFTDELLPLGKRVDKLISVRTDAKGRTKYNLSKRICKLRYHIKNKTTNLHWQTCNYLTTNYQNIFLPHLDTIEISDHIKSNISNETVRKMMMLSHGYFRTKLEHAVKIKQRSLFYIPEAYTTKTCPKCGYENNIGALKVHTCIACDYRGDRDNTGALNICISTLLRTN

SEQ ID NO: 572 - protein, 332 aa, synthetic construct
  REGION 1..332: note = Synthetic
MQSDKDLQENDPMLWQKEVPYDTRQNAIAQCITSYKSCITKLRKHQITHFDVSYKSKKKQTSQSFLVNKDALNCEEFTIFSQRLKKKKKIRVRNRDISTFLEGTNGDVTILKIRPNYWYICLPIKKEPPIFQNAIYKSAFLDSGVRTFQTLYSPDGICGKIGNSEFSDKLKQLSNKHDHLWSISDSKLISSKTKKNIRSRCAIIRKKIKDIITDFHWQTCSFLCKTFQNIFIPRFEVSQMVHGSPLGNKITRKMLQLSHGIFRERLLYYGKKYNRNVYLVGEEYSTKTCGCCGQLKDMAGLKTYKCSNCQIEIDRDYNGARNICLKLLSKFL

SEQ ID NO: 573 - protein, 470 aa, synthetic construct
  REGION 1..470: note = Synthetic
VRDSIDQFFKEIQLSFSSKYNEALGLCGVSTPVKKHSDLPASRLIKILDCFNVSLYSVVKGKVDYDVVERQMRGEVAIPSKYLEGALYSLKSTPLKLVSCISNTLSKEAADEVLKTTQIRGLESDLAPEKVNLILLHDICEYVSAFYGDERVAYLGAQKALNTISMKMGNWNGKIKKFELKFKSKHQITQETFHCNKKALKINLRLFSSRIAQPLRVRNKMKRWWDKNVNNINHDFKIIKEKPDKYYIILTTTRKKVQKTDRKKVVSLDPGVRTFQTFYDTEGSSGKIGDLESLKLMKKAKKLDLLISLRKKIKEIRKRTRQNMKKRCYELRTKVRNIVKDLHWKTCHFLCENYETILLPDFKVSNMIERCPKRLRKINNEVVRRLLCLSHYSFKERLKHLVNCYSGTRLIIVNESYTTKTCGNCGLIKEIGGNKKYNCPSCYSIIDRDINGSRNILLRYMTKHGLDSTR

SEQ ID NO: 574 - protein, 441 aa, synthetic construct
  REGION 1..441: note = Synthetic
MVQENIKFTRKIKFFPSTDLKIYLEKCFGASRFFYNKTVEYINSEYEKNKKKYDKDVKKGCAYKNKKGNQCCKKISKNSNYFCNNHIKQKPKLCPSLNFIELRNKLVTKNTELKENEKWQEEIPFDLRQNIIKDAITAFKVCISNKKAGNIDKFKVGFRDKKNLTQIFHIPQEFINFEKKMLFPSKKLKFHMTKKEQKEFKKIEMKKRLRITVLRKYPNKYYFCIPLEKKQEKIKPKFNVISCDPNVRNFMSIYSSDGIYGKLGENITDRTDKIQKRLDYLEMLKNFVNKKKRYRIKRRCSLLRNKIKNIIEDFQWKCANFLCVNFETIIMPIANIKSKIEKNGKRVINKKVVRRLTTLRHYSFINKLEHKAKMLKRNLIKCSEEFTTQTCGNCGELNKKIGGKEVFICEKCKYKEDRDINASRNILIRCLTKLIRVDQPK

SEQ ID NO: 575 - protein, 556 aa, synthetic construct
  REGION 1..556: note = Synthetic
MLPLIKQQSSTVSPKMPSESGLMRDVSNLSPPKVDTGDTSSPTIIPPPHPTLRKNVKTSSMLEFRLENKKMTLNVKSHSSRTSTPPSSSCLTSDQDSTQNVPDSAKYWKEFSKELSTKLWLPTEIDLAGLDTHYLSGYSNNTVPLSFVIPQKNPRIKKNSQKTSWPSLLSIQPSTMEAESINDPYTRKVRFYPSPAHKILLSKCFGTTRYLINQAIESIRDGKLKKYSHLTLRNHLMYRDKNLTDHNAWLREIPYDTRDEAMRQLAANIKSNFTKLKRKQITKFVMRFKSKRHARQVCYINKTALNIKKRTLFVQRVKEPLRFAEDISGFKPGTLTVLREHGRYYMCFPLERERTNSKTSDIIALDPGVCTFQTLYTPDGTVGKLGHEMRGILRDKYKREDKLKSILSKLKEHRKRYNLRKRCGVLRTKVRNIVVDFHRKTCSWLTNNFGHILLPNFKVKNMVNKSDRNIGKSTVRGMLSLSHYKFRQRLLEMGQSRGCKVYICNEAHTTQACGRCGILNKKVKGSRTFNCNHCKVKVDRDYNGARNILIKHLIKD

SEQ ID NO: 576 - protein, 431 aa, synthetic construct
  REGION 1..431: note = Synthetic
MDNEVIKTRKVRVYPNKKQQIEFKKYFDTSRYIYNQCVEYYSTENETLLKKYNDIKKDGCVYKNKTNTTRCKKTLDGEGFFCKTHKYYKHTFELTTSFITMRKTIMKSDKDLLSKEEWLKDTPYDTRQLMIKSFCGNLKSVITNQIKGNIESFDFEKKKENKKLFHISKNALDGDLQIFKRRLKTNSKLKKKKNNKKQNYKIECDCSMEKIGGKYFLLIPIKSDRINTKATYDTISLDPGVRVFQTGYSPDGLIMDFNMNRNKLEEKEKYHNNLTKVNLNKISGKTKRHIKNKTSLLRTKMRNKITDFQWKLANYLVKDFNTIIIPKFQVSKMVKKENRTIGKITVKKMLELSHNKFLEKLKVKCIEYNRVLIICTEEYTSKTCGKCGIINKTLGGKKIFKCETCNLVIDRDVNGARNILLKCWDVMQSLN

SEQ ID NO: 577 - protein, 626 aa, synthetic construct
  REGION 1..626: note = Synthetic
MFQKLWFPPKTDSLVSGSHSLPGCHRNSTVNYSLYQATKLEAKNKNYLKTCYRSLHTSLPNITENEDTKSHKKCLGLKQIEDGTIMRCRKIRIFPNADYMKYFNQCFGATRYLYNKTIAQFKQEIEKTQDEYSESAKKDGCVKLITPSKKDSETAGSVPKRCCKKIEGEYFCKQHSKCKIIYKIPLGFIHWRDIMIKGKDDLSDDEKWLADIPFDTRQLVVKNVMGGIKSAFSNLKNGNINEFDMSFRTKKENLNHFYVDHRALRADLVLFPKKFKKPLTVPKRDFKWLQDHIRNNKMCDMIISREQPGFYYLQIPYELELIDHKTNNSVISIDPGVITQGTFYDPSGKCGKMGDGLGRKICELYWKMDKLNSSVAKEANNLKTLKTNPGKLTMDQYKKIMTKKKQRLTKQQEKLNVRIDAEKKLRRGLIEKQDSTQASNKKILRLQKQLMQKIIKNNSLLNEKSLDYYFEKTEQNYYIKKSKKKIKNLKKKLRLVRRKKQNVTKESHQKTISYYTQNYKYIVIPEFNARQIAKKQKMMGMKKEARKTMGMCHGKFMERLKTKVESIKNCHLIIVKEDYTSQTCGRCGILHKVERDRIFICPNCGLDQDRDTNAARNILIRGLLQE

SEQ ID NO: 578 - protein, 468 aa, synthetic construct
  REGION 1..468: note = Synthetic
MEKQNIILTRKIRIFPCVEHINFFNKCFGATRYIYNKTLDAIKKMYKKNSKILRTKAKKGCIHQISKNKSGSKTTKNKNQCGGKLYNKYFCKKHKHIKPKLDLPLGFQFWRNKMIKKNNNLSESEKWLSEIPYDTRQLVIKNILANHKSAITNLKNGNIKTFDIKYKSRKNKNQFLFVDYRALKPDGKLWNRTVKTPLGMRKGEKRWFDNYMKEYELKKFGDDKGDKERKDMIITREYPGMYYLHIPYTKTIEKKPIQESIISIDPGIRTFHTFYDPEGKCGKIGDNLTNHIIKLYEKIDKIQSKITKTNTKNNDLGYKKNKLCRQNMRKKCAWLRTKIKNTIRDYHWKTASFYCKSYGHVIIPKLDTDSLKKKIKKDYGLSKGSPMIRRIMALSHNEFINKLIHKSKEYNTNVLIVDEAYTSVTCGNCGIKHGKLGSNKIYKCVHCKKKIDRDINGARNILIKTLSK

SEQ ID NO: 579 - protein, 506 aa, synthetic construct
  REGION 1..506: note = Synthetic
MCLNIQEKKLYMLEYQVKNKKKIFINKLNLSNLNILTTKLSKTLDLDLTLKEEGLSPFWNKSSIEKSKKLSLPIMTDLYALDLASYCSSVNTSIQNLQYSKIKIIKNQKMNLQMNLYPLLPTTHQNFMECENMTYCRKIRIYPTTKQKEYFETFFGASRYIYNKTIEWKKNNKDQKSLIFHKIRPHIIIANKDLDDNHKEAWLKNIPYDTRQLSLKNALSSIKSSIQLLKNKNIQYFNHKFKSKKDKKQTFYIDHRALKNLNLFPSLLKKDKKLKVKKKYKKYENYIPSSDSIILKDGKNYYLLFTKEKEKINITEKKNNIISLDPGIKKFQSFYDTNGYVGEFGNIELKKKLFKTEKKIDKLMSISTKQKKLRLRNKCYKLRTKAKNIISDFHWKLSSFLCKNYKVILLPIFKSKKMRKNLDNISNRVLNLYSHYKFKEKMIYQSKKYNCQLIIVDESYTTKTCGCCGMINNFIGNSNIFWCSSCKIELERDYQAARNILIKNTK

SEQ ID NO: 580 - protein, 594 aa, synthetic construct
  REGION 1..594: note = Synthetic
MLCSSHLNKPPNILMFQRKLLDYGLKMEKSSLLKQKKVIEDMKSIFKIINKKGFLSYMQGFHQRNKKMTLKDKFFFYNKNIQRLNSLQTLVQGLISKEKDLTPFWTDSSMELSKKLWLPTKTDLQDSDSNSLSSCVKNSIQNSQLWMKKSNPLLKTSQKTFSQLSQFSQQDTMESVNMNYCRKIRIYPNKKQVELFNKCIGCSRYIYNKGIYKLKNEWNILKEKALNEGCLKCGKELHSTLYCKKHSNLKPKINFPLTLSKLRPMLMDSDKNLNEDEKWMEEIPYDTRQLVIKSLIGNIKSSISNLKNGNIKSFSMNYKKKKDLKQVFFVDKRAIQKLNIFKRRLKKKSKIRVRNRYKKYYNMKIKKDCIILKDFKYWYVLIPKDKDIKYKKAEYTSCSLDPGVRTFQTMYSPDGLIGKFGDEFALQLNKINQRIDLLKSLKTKKIYNSKTKQNINLRCFKLRTKIKNIVNDFQWKLSNHLTKNYNLIMLPKFETKDMSSSKKLNKKSTRMLLTLSHFKFQEKMKYLCKKYQRKLLIVNESYTSKTCTKCGNIDKKLGSSKTYNCKKCSLEIDRDINGARNIFIKNYIGQDEGL

SEQ ID NO: 581 - protein, 425 aa, synthetic construct
  REGION 1..425: note = Synthetic
MDPVNITYSRKIRIYPNNEQKKLFNKCFDVSRFIYNKGVEVINKTYQDQLNNYKKQNENGCITCKAKTENNFFCDKHKKQKLKWKLPLTLPTLRPMVMKSDKDLTENELWQKEVPYDTRQLVLKSLITNYKSAISNKRFGNIKEFEFKFKRKDNPQQIMFVCKKAMIGGCIFKRRLKKKSKILFEKRHDIYSNYTPKHDFSIIKEHNKFYVIYSKERISSYKNAKYDVCSLDPGVRSFQTYYSPENCCGSIGDNVNSKLTTMNNKLDKLSSIINSVSGRTKHNIKKRCLSLRTKMKSFVRDLHWQTCSFLTKNFGTIIIPEFKSKNMVKKDKTRKIGKRTVREMLGLSHFSFLQKLKFKCSEYNRKLIITTEEYTSKTCGNCGELNQKLGSSKVFHCRKCNLHIDRDLNGARNILIKYLLKKSLN

SEQ ID NO: 582 - protein, 445 aa, synthetic construct
  REGION 1..445: note = Synthetic
MEEEVIKKEIILKTRKIRIYPTTKQKIFYNKCFGATRYVYNKILEFVNNNKSKIYTQLDNQSKNGCTYYDKTSKQYCCQQIKDKYFCKKHNKSKIDFGFSLNIGSLRKNSKLFTAKYIKENPWLKNIPYDTRQLVINDFIAAYKAAITNLKNGNIKGFEMKFKSIKQNTCFFHIDKRAVKKDITIFKNKKLGKNRVRSKMKKWYDKNINDKITNNCKIIRYRPGIYYLLLTVKGQVKNENFKMKCVSLDPGVRTFQSFYSPDGIVGKLGDNFINNNTMKHAIKIDKLNSVKKKIKNKRTIRNIIKRQFLLRTKIKNAITDLHWQTTCFLCKNFETIIIPKFGCKNMSNKKISINSKISRKMLMLSHGSFLEKLKTKCKEYKRKLIIVNEAYTSKTCTHCGNIKNDLGGNKNYNCLKCKLKIDRDYNGARNILLKTVCKNLDTESI

SEQ ID NO: 583 - protein, 466 aa, synthetic construct
  REGION 1..466: note = Synthetic
MHLFNEEGNLKVNLQELRKICESEKFQRSETGFWNQNCSIIKDKLLATEFINHDKATDTIISRRIKFKPNYLQRKLLNDCFGAYRWIYNKAIDVIFEVKKYSDKFNCIIDIKLVKKAIYENVKINDDEIPDFIKILPSDSRKEALREAIKNYKTCLTHLNKKLCRRFLLKHKRKDATTFRIKTNAIKLTGNKLVIFKKRILDLIEAGNLNKDLRYATLNNGNLRRLKPYLNASGNPTAYPLINYSHGNYYIIVSGNRKVEQCNVKKEICAIDPGVVNFHTIYDGVVGYEGVKLYETRLEGINQRIDKITQHKQNFTGAKRKRMHLRELKLRAKVSNIVYQFRHTLASKLCNKYKVILLPKLGIKQVAKHLRRQVNRKLYALSHYKFNELIKQIATRTGTTVIHCLESYTSKTCGNCGNLQTCDVDRTFRCRACYYVADRDENACKNILIRSLNNYILSCSSSGKRK

SEQ ID NO: 584 - protein, 661 aa, synthetic construct
  REGION 1..661: note = Synthetic
MYLQKNSKLFFKYLNLLSINGKERKKLISLLLHQVQFVIESTQFIKKTLKMTIKKQNELNQKHQTKLIKQAKQQIKTKEQFILEFLLQNKETVLKDKKFICPTNIPILEFLKTLDQELISRDHNSLIYWNMLSLGQSTKLPFLAKTDYVDLPLIYSTGTLNNSIVNCWWKTKVIQPKQKIGKTNYFPLSKYFVIDGMVEEDTLKKTDSLIRSYKIKLQPSKTQQKQFKEYFGSDRYCYNYSLAKLKELDELKKLEDMNDKNLFRNMCMGYKSKNYCIKHKEFNSECEICKFKNNLQYDSFEDNLNTKKWLSEYVTVKKEAIYEAWKNYKQFMNVRTFKENSKIKFKNSKHTKNHQFRFEYKFLKLIQKQNKFKNKNIYKLNIFNIKNIKFFYGRKRKQLSLLNQYFQNPKDAMIEKNEFGDYYLILPIYKGDQVTVINSNGKREQMNMDKAKRYKKKMIKENEEVIIERSNQEYIETKECFIDPGIRDFYTLYDKQTHNIFSIGVGSCKKINEMNEKMRMTSKKDLRIKLRRRIFNLKNEFHHKISNWIVTNYDLIYLPKFQKSQMVRNKGRKLKTKTIRQMHTLRHFGVMQLIKEKCKLRQKKVLICNEQSTTQTCGNCYFKNLNIGGAEEYTCPICKKIILRDQNASRNIGILNLIQLF

SEQ ID NO: 585 - protein, 461 aa, synthetic construct
  REGION 1..461: note = Synthetic
MFYIYMSTIIDDNEPPPTYETSIIQDRLVTPFWNDKSESVSKKLWVPYAIVNHKTRDIHTLEHTGMTHSISVDVPSQPILKDVIVAKKLRIYPDAQQISFFQKCFNAHRYMYNKSLADFRTHNERSSISIRKRVLIPDKSMPKDHPERWLKKVPYYIRDEAIRSLAKNVKTCMSHIKSKLITHFKLSFMSKKYSDDIFHVAKAAISKDFRICPQSLDKEISMSAKSKKWLTQLGRVQHDCKITRNKAGHYYIIVPYKRPTEVHEVNKTRIVALDPGVRTFQTFYSQTECGKIGDAAINDIKKINAVIDKKISSMTTVRSKTKYNLKKRCNKLRTKVSNIVSNLHWQAASYLVKNYDIILLPTFETKKMVNKESRCITKGTARSMLNLSHYTFKLRLQHQGMMHNKKVILCNEAYTSKTCGTCGVLKPKLGGSKVFECSHCGNKVDRDINGARNIFIRSFSH

SEQ ID NO: 586 - protein, 553 aa, synthetic construct
  REGION 1..553: note = Synthetic
MCLQKLQPNTIMCQSLPLEIGRMTLSLNILRLKAVIGAIRFLIKLKLVKKKPAYMQEYPPENKKQISIDKLSNSLNLDLKSDSTKILEAPSISKGQGLRPWWNELYEERSKKLWLPKEIDLQDVDSSSLNGSFLFTGHKLQLYQTPTLDLEKTLKKNSLTTSCQLLQPLPQDTMVRDMELNIMRMLKIRIYPTTNQKQIFSKCFGASRYLYNKCIDEFRNGKRANFYDMRSVVLTSNSKLDKNHKWLSDIPYDTRQLSVKEFVANAKSAFANLKAKNIKHFSLGYRSKRDKSQTFHLDDKAINKKLILFPKLQSEMLKSDSRKTLKSYFCSSGNKSSDFRIQCDDGKYFILLPKIIDSKSYKNLQQTGKTVALDPGVRTFQTFYSPEGICGKVNPTDKMYKIKCQIDNLNKLTDLKNKLKNKIQKLRTKVKNQVTDLHWKFIKYLCMNFDTILLPKFQVKNMIKRKGRKINKTTVKNMVGLNHFTFQTRLLYKARVLGCIVKIVDESYTSKTCGVDGYINFLLGSKEVFICPKCGLVIDRDLHASRNIYLKNT

SEQ ID NO: 587 - protein, 408 aa, synthetic construct
  REGION 1..408: note = Synthetic
MKDKGVVLRCRKVRILPSEEQREILKSCFGIHRHIYNECVKAEKDGDIDGAGVRECYKWRKAFTTREDYYGQGKNWKDDCPSHTKQQAVEEFFKNKKTGLKLVSEGKIRRFDIGFKSRFKCRQETIPFEKFLIKKKDSTNPLSKSLVSTTYKGKSMDLRIMGKVPKVFKDRDDQGFTRTEMKITRTKTGKYYAIVSFEVPQTSRFPEIHGDMISFDPGCKTFQTYHSPDGTWGEIGTFEKQELLLRKADRLKSRLELEGKDKDSRWRRRTRRRMLNLFEKVRNRTADLHNKVCSWVVNTYRLVLVPEFKTSQMVSSKKLYSKTCRKMMTWSHYRFRSKLIAMAQKFTDVKVRLCNEAYTTKQCGSCGVINRSMTLNDRSFNCVSCGLSSSRDGHAARNVGLRSLRFLV

SEQ ID NO: 588 - protein, 479 aa, synthetic construct
  REGION 1..479: note = Synthetic
LQPNGIIKVRILPTLKQQMVFKRWLGGSNYTYNHALHDIKRKKVSPYFNQLVVSYANDCDRYGNRKLPEFLSFTPTEIRKAALNDLVAAYDAAKTNRQLGNIGHYEVDYRRKKKQRCCFSISIPHDSIQFYIDEKYSDEYKVDLCPTKMKECMTNTLRKGKTKIKSILDECRLLQKEIDISDFYPINPEKNDYKNINTRIDFIDKKLKQNVFPKEMNKKPNFKPNVNTSIRVARLSRPGRNKSLDRLINSSQLNYNCRLCYKYGFWYLHIPYIRTSYPEPKIDNQDIVALDPGFKTFQTYFSSSGKYGKYQHDERRLKRICSMLDYYNWSKTNWHKPKYVRYKTDKLYRKQQHLVDEMHRQIIQDLTSQYNWIFLPSFETQDMLVGKSYNKKHREAKRHAYQLSHFKFKTRLINRCEQLENCKLLVVSEAYTTKTCTCCGWIWESMTTKDRIFNCKECNLKMDRDIHAARNILIRNLTG

SEQ ID NO: 589 - protein, 529 aa, synthetic construct
  REGION 1..529: note = Synthetic
MSKNTPPTGVLKIRILPTKSQQQVFKRWLGSYNYTWNKALHHVNSENARPSYVPLKNKFTVMNPIYLLGQSNPDVPDFMVFTPSKIRQYAVRDLCTSFESAKTNKRRGNIGSFTVKNKKKKNQRRSFSIPISKDGICLYDDELKRKCEGKQKAYISIYPEAMMECFTHIKTKPLRNVDYMLNSHLKYKKHVQSDEIWLEYLDFIKTCGVCVTMKQFYLREQNQSLYGMDLWQDYFDYMMEHGFYSSIDSDYKDVYKQEPVEKKKSDEKKKPVEKEKHVPFIRFFHRKHDKLLYSLTIDYDCIIKYEYGMWYIHIPYVKAPRPEPVSTDSIVGLDPGFKTFQTFFSETMHGKIQQTNRFKKLRYLIDYMNTLYYGKKKNRVWISEPDRTRYKNFMFKTNQLYRKQSNLAMQMHYDTIRFLTGKFNWILLPSFNTQEMVKGYKLSRETKREASQLQHYRFKQRLQSACSSMSHCKVLIVSEAYTSKTCGRCGNLKQNLKLVDRIYNCSKCKLKVDRDVNGSRNILLRTIQS

SEQ ID NO: 590 - protein, 387 aa, synthetic construct
  REGION 1..387: note = Synthetic
KEEKKTLRKRDIKATKSQYKYLKILSGSYRYVYNFCVKYHKDLPTKKDKRQFLLNSNSPFRPMWFDREYILNKGQEDEFKFKISYDHFEGAIIDFHSNLKSSKARQKSQRSKGNRSGNITMKRKKDKFNSFRIKHRDWKNGFPFSWKTEFITKADISKDTRIVYNRSKKKWSIIEYKTNIHVDNQDDFCGNIASLDPGVRTFQTCLSTSGDIIYFGHEYRKKLLGYSNRIDSINSMLTKGIKRKYNLLKRRQRLYDKITNTSKELHYLVIKELLDNNDIILLPDFNIKSICKSLHHKPTKRALYGLGHYRFKQRLLFKASQRNKKVLIVNEAYTSKTCFNCKGITRCKDENFKCGHCDLVTSRDLNASKNIMYKNIDLIIGHIAHYA

SEQ ID NO: 591 - protein, 650 aa, synthetic construct
  REGION 1..650: note = Synthetic
MSKELNERYILNPDTNRYVLKSGTTGKHILGINKKIKIPKKIVPHLPKPIIPKNCILILDRLGCWQIFHLSYFISSIHRIKNELLIIQSDKESVIHRIHTTILIGTLILIKKNKPIIIEYTSVHWRNLVDNLASLDVATQSIKWYPMIVRILTGTGKESKPYWYQSYTDLSQKLWLPTLVESEDVYLECESLYENTNSWFTIKKTEPIIKDSSILTSIECQSMILDSVDIKKESTCSIQRTRKVRIYPNKSIIKQFKTWIAGTICIYNKIVYFQEHCSKEDKNMSEDKLKRKFVYESIVTRKDVSELNKDRKGSYKLKGIILDKQSNPDIIEWTKKLPKVVREGAAEDYCIGRNAAFTNVNLGNIARFKMKYRNYKNDPAFHISNRVQSISNGKYIKLFPRILKKVNITNPHILVNKGDRSFVEQYIGKKPKQQCKIKYEYGHWYLVIPYMSDVQPISIERGACAIDPGVRTPLTLYDAERFISFHYKKEIYTKLIKKLHILQSLRDKKYITSHSYKKARFRIRRRWTNLVNDMHYKCASYLVSKYSVIGIPSFETSKMVTGSLYKKTKLELLDWCHFKFKTRLLSKARQLSYVLHPDESYTTQSCTNCGTLNYVGGAKIYDCKKCHHKIGRDEGSSRSIYMCMILGRLV

SEQ ID NO: 592 - protein, 408 aa, synthetic construct
  REGION 1..408: note = Synthetic
VRIYPNKSIIKQFKTWIAGTICIYNKVIYFQSNCSEQDKNMSHFELREKFVNEMIVTRKDVSELNKELKGNRKLNGAILDSIPNPELNTWVRKVPKVVRAGAIKDYCTSIKAAFENLKRGNIASFKMNYRKYINDPAFHIEKQANSVSNGKYIKLFPSILKKAKIYNPCILVNKSDRQFVEKYIGKKPDQDCKIKYEYGQWYLIVPYQSEITPINEVRGACAIDPGVRTPLTLYDAERLISMEYKKEIYNKLIKKLQLLQSLRAIKKIRNRSYKKARYRTRKRWVNLVNDMHYKCASYLVSNYKVIGLPPFKTSEMVTSSKLNKKTKLEMLNWGHFKFRTRLESKARQLSHVLKIDESYTTQSCTNCGTLKYMGSNKIYDCLTCNHKIGRDDGSARSIFMCMMHLRYV

SEQ ID NO: 593 - protein, 433 aa, synthetic construct
  REGION 1..433: note = Synthetic
LQLSPSSQPESKVGGGTALKTMKVRIYPTWGQRQWFIKTMHNCRALRNEAVALEREGKLKPSDLSKGRVGSKLISTSQRKAEFDTGSEKWKAINSTPGHIRKQTLMQLKSNYDTAFTLLKKKHINHFKMKYTERKVKKGRMTLNIDATQVKLKAKNDSELSGFLPQTIIKERFKENGEYVFKDVNFGSIRYKLQGSKRRQLREKRAFPNVKGRFSILYEEPGRWFFCVAYEKPIQTTKAKFNDVSLDPGLRNFQNFYSADAQTVGTIDMPDMKNNLMSLINKIKYAQTMKDKARSKHDSTRWLNRFYFLWNKFKNKKNDLHWKTIRFLVDNFETIYIGDMGSKFIQQSKVLGKKNKQKGTFLSHYQFRQRLLESAATRTIVVVPESYTTKHCTSCGCINGVGSSKVYHCSSCKITLGRDDNGARNIHLKGKCM

SEQ ID NO: 594 - protein, 488 aa, synthetic construct
  REGION 1..488: note = Synthetic
MLLPKSSWFKACGKTVTGPPGSVISLDSDLLDSWLMTTDGGAAQVDNKSLVTKKQRTESNKGTAWVKTRKIRVYPANDAQHTLLPKWFGTARWTYNQCLKALQEEKSVFKPNRSGGLREAVVNDGNYILENTWVLDTPRDIRAGAYQDLLDAYTSNYAKRKKNPGHAFTMSFRSRKSAQERLYIDRRRYHKGIIYPKTFGSVPLRSTEPLPERLDHDASLIRTRLGHYYLCLTVDVKRDDNQVPSDTPPRVAAIDPGVRTPHTLYDPSGKLIEFGKNDIGHLYRLCHHLDCLRSEIDLLPKRCAHPDLKRYVHRKRWRIRRAWLHGSQRIRNLVDDYHKKVVHFLVTRYDVVLLPALETSRLVLRKARKLTNKAARAMVTWSHYRFRQRLLWKSRTTGCKVVVCGEAYTSKTCGRCGWLHDKLGGSKVFKCGQCGLEVDRDANGARNILLKNASRFGFRVEVALGLTPAVVDNRTDARPSRPQASATK

SEQ ID NO: 595 - protein, 512 aa, synthetic construct
  REGION 1..512: note = Synthetic
MKRRRAASTTIVPLAHLPFWSPSVAALSAQLWQPPHGRGIPVLPHTGWSSATCQSALVCPTLDEVRADYTAPVVKRQTKRRRGLVEGPQLPLPPTAIIVRKYRLMLSMDQRVTLKRWMGAARWVYNQVVAWIREHKSMDKAGRQAMRDTFVKNTAFPVGHWMRDIPTDVRAGAYRDALDAYDTNMKKRKKDPTFIFEMSYRSKKATSESIYVCSRGYHPVGDRQAKIYPTFLTMPFTARPALPSSVDKDCRLQRTVLGHFYFCVPTDVPLEPRPATSDNQARVIALDPGVRTFQTGYDPWGHLFEFGKGNIRRIERLCKHLDQLQATLAKPEMRAPRRYRVGRAAARLRQRIRDLVDDVHRKTAHFLATSYDVVLLPMFESQRMVNKNQRVGLTSKTARMMLTWAHYRFQQRLIQRGKRTGCEVRLVDEAFTSKTCGACGALHPGLQGAKLFVCPSCQHTIDRDANGARNILLRNAASIHLDVRPRPPSGSLSPGTLPQGSAQLAGAQASTS

SEQ ID NO: 596 - protein, 516 aa, synthetic construct
  REGION 1..516: note = Synthetic
VKFKASQFNWELFRELHPETINIIVDDKTDPIVTLVRVFLTSHYPDITIKRDVNGRREIDKKYAFNAKSKQELDTFLDASGMGRIVNCSGVGSEIMCSRRHKIVTTPDMKCLFRQWFGLHRKIYNICVSLLNNVKDGSGPKQTSSGGIKTYLRSYVGNKKSINEHYPTMMYLAECPEPIRDAAITEIATSYNTNIKLGKKLGDFAMAFKSRRSLYQTTTIKARDWHNGQPYYKCWLNANLKDTNIRFTSKTHQQRLRKTENAPSKEFAIEKLSNSSKLLYCRATKDFYLIIPSVVPAENIQPAKGVGENQTNHPRLLFMDPGVRTFQTGYDPEGNILEFGIGYDKIFNSCCVVDKLVSMCDKKTKHPGVCHRTLHKIRSIVLPRLRYRLRNRRNDFHNKVAKFICENYSDVHVPAFETQRMIDKNKVRGINNKTARMMCTWSHYSFEQKLKYYASRSGTSVHIANESYTSKTCGRCGVIRSSFSGKEFVCPSCGLVLDRDAHAARNILIRQCCIGI

SEQ ID NO: 597 - protein, 604 aa, synthetic construct
  REGION 1..604: note = Synthetic
MRVAHSISQGPRCDAGATSVACGSPSPMVTGVTTSPTLSVSSVPASPRPPPRKRRASSTPASRPPTNAPTSTAKSPTSSAPTHSTSSSPTSPPGSTGAAPACVPFWNASSQALSLRLWWPTATGSAASPLTSSSSSAPSPRAASWFTVATTPRPASSPTTSSPSSPCLSRAITESVRRTTGASDANTKPQHASKRQKTDKPPPTRVRKIRLFPSPDEAATLRRWVGTARWTYNACLAAVKGGTPRTLAALRAACLNADSPLLQANPWAAETPYDVRDEALRDLLKAYDSTFAAKRPRFTMRFRSKKADAEAIVVHAKHWVHKRGVYAFLARMRAAEPLPDVLGYDARLVRERYGRYFLCVPLPAPAPVISGENQARAPRVVALDPGVRTFLTAYDPAGDAHEIGKGDVSRLHRLAHAADDLQSRWTLIRNGTASIFPVPEHYAHWSRADYRHRLVYRQKRAAARIRRRVRNLVDELHRQAARWLAREHDVVLLPVFDTQRMVRRSPARKLSSKSARGLVTWSHYRFRTHLLHKARELQCDVVLCNEAYTSKTCGACGHLHAALGGSKVFRCPSCGATADRDVHAARNILLRYMSTGPSASYVGA

SEQ ID NO: 598 - protein, 569 aa, synthetic construct
  REGION 1..569: note = Synthetic
LPNWAWLNPAFQKNPITNSWFNVKSYDNIDPAFRAEPWELLRTALVLPEPVVKPAPTNPKAKPKTQPKVSAKPRDKRQKKAPFDLNATVSQLNASAKASNPNKAPTVPIKVRTRKKPPPKPPDPVVSKAAKPKAVKPSKPPPVGVKKIKLYPTEEQAGLLRRWFGTARWTYNRALNTVKEHNAPVQKKILRAACVDNSLWANEQSLAWVSETPYDIRDEAMIDVIKAYKSNFAKNTGKKFELKYRSRKRQTHDSIVIHLKHWFKGIIHRKYWVGDPIKASEPLPETLAYDARLLWNMRLNEFYLCVPRAAEMRRDNQAPPRSTIIALDPGLRTFQTTYSPDGRTLEFGRDSKVNPTGKTNKKGNGGISRIMRLCLHLDKLQSKWSQPDVRHRKRYTMKRAGARIRKKIQDLMLDIHHKTAKFLCENYQVILVPLFETKHMVCRLKERLGKRNGSKTARMMMTWSHYRFRQILLNKAKEYPWCQVLVVNEAYTSKTCGQCGFVHYKLKSAKVFKCPRCKVEVDRDVNGARNILLRFLSTDTRSSGFRAQIFNATPSGVLGACTRLPPRGV

SEQ ID NO: 599 - protein, 273 aa, synthetic construct
  REGION 1..273: note = Synthetic
MRLGEFYLCVPRAAEMRRDNQAPPRSTVVALDPGLRTFQTTYSPDGRTLEFGRDSKVNPTGKKNKKGNGGISRIMRLCIHLDKLQSKWSQPDVRHRKRYTMKRAGARIRKKIQDLVLDIHHKTAKFLCENYQVVLVPLFETKNMVCRLKERLGKRNGSKTARMMMTWSHYRFRQILLSKAKEYPWCQVLVVNEAYTSKTCGQCGFIHQKLGSDKVFKCPRCKVEMDRDVNGARNILLRFLSTDTRSSGFRAQIFNATPPGVLGACTRLPPRGV

SEQ ID NO: 600 - protein, 598 aa, synthetic construct
  REGION 1..598: note = Synthetic
MFQAAISRKSFIFLPARSTAGPTTVVLPAFARPAASDSTPATMSTSSSALSSCPPKRKSATLESAAPSSVPTSTASAPTSAKRIRITKSSVKLAAALTTTVPSLRPFWTASTAALSARCALPVATGSVDMGSSLSSSSLPRPTAGSWFTCSTQTRPRTTSSLRISSLLSTSSLPKTTAARLQRKGKCEKPAAEKSMKIRLFPNSEQRQMLSSWFNTARWTYNRTVDAIRNGCERSKKALRALCVNNDLWASDELEWVKDTPYDIRDEAMNDVLKAYKTNFAAKRTQFIVNFKSRKAKSDSIALLAKHWKASGLFHPTVWGKTPLKAAEPLPDKLDYDCRLQRTNLGHFYLCIPRPLEFRSERQAPVQPSVIALDPGVRTFQTGYCPDGSVIAFGDKDIGRISNLCRRLDQLQSKASQPEVRHRQRHRMQKAMRRARERITNLVNDCHHKVAKQLCQSYTTILLPLFETRNMVSRIKRRIGSKSARMMLTWSHYRFRQTLLSKSREYPWVEVIVVDEAFTSKTCGQCGELHQTLGVSKVFVCPKCKFTADRDVNGARNILLKFLTEHERAEAIRRWGLAPGGGANANPPAELDMNVHFG

SEQ ID NO: 601 - protein, 543 aa, synthetic construct
  REGION 1..543: note = Synthetic
MECPSASGWQKTEVTTSSPNQKRKREACDKDKDKKGRAVYPFWNEATTRWSREHLPDADRIMAAMPISSIPKTCFDAYVHFSAYRSAGDRPWRAILESGLPAPPPPPIPRVKSRTKKKTTAPDCGQPTAKKKSSYKAKTPKLPGDKTKRLRIYPTKVQKDLLSKWMGTVRWTYNQAVDAISKDTSLEKNEKRLRSIFVTKKAIENLKSSDDPFDHDFSWVLETPSFARNRAIADAVMAYQSNRAKQAKQGKRYKFDVKFRSRERDAQQSIAFSSADWGRTRGKFAGLLSHKVLRCCQMLPDKLDYGFEIVHIRTTSKFYLCLPGPLEIHARDPLKPFRAIALDPGVRTFQAGFDSDGNAFEFGVQKDERRIFRLCQHLDQLESRRTALQPGGDLTRFLYRHKKRANMKRAAARLRERIRNIVNELHRKTSLWLCCNYDAVLIPEFQTARMAKRGEERCIGSKTARMMYTWAHYRFRQHLMHKSRASTLRAGWSSFERTTRARHAVDVVRSTGNSEVPKCSDVQPVDMQQTGTSTQCETSSFDI

SEQ ID NO: 602 - protein, 384 aa, synthetic construct
  REGION 1..384: note = Synthetic
LRAGAKVQNEEWPKKAPEHFWDVPYKIRDSALLDVSKACAALKAKEGAVKRKLKHRSCSDRRQSVALEKRWLNSATKRSVWSCVFGTTADRSALSIEGGKTLPLVFQHDCRLGYERLTNRYYLSVPVDVCVLPVLSDSGRGIVAIDPGIRTFATCYDPAEHTITKCGNIGGRKNGLTKGTELLGWIARKSDRLVSKATRAHGRRRRRIRKVATRLRQRAIDLTDELHHKFALDLCQKYAVVLLPKFSAKGISRRDAKKQRKIGRRTARKLMQLAPFKFRQFIIHKAREFGTQVVICDEHWTSKTCGSCGAIWHGLEGAKTFACPTCGWRGDRDANAARNILLRYISKNEITIDFTLRALSTGDPAPAYMGKDRTSCCATGFSPN

SEQ ID NO: 603 - protein, 471 aa, synthetic construct
  REGION 1..471: note = Synthetic
LPSTDGAVKTERTSHSWFGFEETTWENHHPNSKLVREVKRVSEVNRLDIEEETKAKLRPPKKKRKTDDGAVDTGKENAEPTETKSEKWRIHPTRRQRAVFRLWFDATDRIYNRAAKMINSNKKTSMEMMRPIIKDEVWRSETTVRMWKIPYEIRDLPLRDLMKACKALRAKEKILKRKFKLKEKMGATCSVTLRSRQLNAKKTSGGNRVWPRVFGTLRDRSAMRTEKGKTLPLVFKHDCRLIWERKTGFYYLCFPVDVDRSAPSDVKAVVSIDPGVRTFATCFDARHGKVTEWGCSHTTKILYWLIRKAARLEKKSKEARGRHRRRIATVAARIRKRSTDLVNELHRKLAIWLCKNFSVVLLPKFSTQQMTEHQTKPRRLARKTSGGMVRLSHFKFRQFLIHKAREYGTTIDICDEKYTSLTCGSCGTLNGKLGSSKTFKCPRCGYEADRDHNAARNILLRYVWKNDSETP

SEQ ID NO: 604 - protein, 376 aa, synthetic construct
  REGION 1..376: note = Synthetic
MDLEQESIGELKVKKLRLYPKKKAKRKINEWIGATRWIYNKCVEAVNSGERKCNLKELRELISSEEEEWLTEIPYEIKDGAIRDLVKAGKATRKTRKKFSFKSRKDLQQSFYLRARDFFRKKGKFSFLGEIKTREELPELEHDLRLIKDSLNRYWLAIPVPLEIKTLNESQVKRVVSIDPGNRTFATCYDPQGSITEWGVNDQERLFRLCLKIDKYTSEASKSNAKRRFVLRKKIKRIRSKIRNLVDELHRKLAKWLCSNYQVILLPEFKVQGMAKKSKRKISNKSVRKMMTLSHYRFKQFLINKVREYPGVKVLIVTEEFTSKTCGRCGVENNKLGSSKLFECEREGCNLKIDRDHNGARNILIKTLTESKMSCS

SEQ ID NO: 605 - protein, 460 aa, synthetic construct
  REGION 1..460: note = Synthetic
MAFEARRAESGDGMKPTPRSGPKKKKTRQTKTKKGMGKEKEPPKKRAREGNKSESTKGEEILANQEAQVKARKVEIFPDSEQRRKIDRWLEVARWTYNQGVWATKERLIPMQISKLRAAFVNENGLALHRWLWATEVPYEIRDGAMMDLVKANKACRAKNMLRKQRGEDSVAFDFRFRCKKDRRQSVVMLKKNWNVPRSAFFANVFTPLMKSSEGSLPSSLFHDGRLVRERKGNRYRYYYILNVPLESRGENQAPSDRAVCAVDPGVRCFATIYDPHRHSVVNWGDGDMQRIYALSNQVDKLQSRWSAPGVRHRQRARLKNRASLLRSRIRSVVDETHKKLCTYLCSNYAVVLIPEFAVKHMVSRKHRKISTKTARAMCTWGHYRFRQRLCHKAREYPSCRIVVCDEPYTTMTCGACGVLNDKLGGAKVFRCPNASCRCILDRDANGARNIMLRYLSLVE

SEQ ID NO: 606 - protein, 306 aa, synthetic construct
  REGION 1..306: note = Synthetic
MDKDKWGQTTKTGLYRDIFTPHMKSDEVLPAAMIHDGRLKREWTGRNRYFYIFPIPLGENQAPKHESDKGVVAIDPGVRCFATLYGPQNRTVTNWGDGDVDKLYQLHYKLDRLQAKLNSNVPKKLGTSLNGKQRPTTWPEWKVRKRQRYRWRKESAMLWRRVRALVDETHKKLATYLCNSYSTIILPEFATQRMISRGHRNIGPKTARAMCSWAHYRFRQRLLHKAWEYPACRVLLRDESYTSKTCGACGSVHSRLGGSKRFVCPSCTASLDRDANGARNILLRYLNECGVESLATGSFIPGDPAW

SEQ ID NO: 607 - protein, 382 aa, synthetic construct
  REGION 1..382: note = Synthetic
VYPTLKQKETLNSWFGCARWTYNECVKLIKSRKVKANRGALRKACVNNCNFKDKDQWVTETPYEIRDAAMIDVVHAVDTNIKKGVRFDLKFRSRRDESQSISIRKRDWNTRQRGQFKFMNSTDLKSPETLPDELECDSTLIRTRLGHYYLCLPMELKVRSAENQGTFGTIQSACVDGVISLDPGIRTFMTGYDASGQSWEWGKQDIQRIYRLCHTADKLQSKWSEKDIKHKKRYSLQKAARRVRLKIRNLIDEVHKKLAKWLCENYKVVLLPKFETSQMLRRGQRKLNSKSARAMATWAHFRFRQRLLQKSNMYNGMSVVACDEAYTSKTCGHCGELSTTLGGSKVFKCTTCASEFDRDVNGARNILLRYMTIHCHEICTSV

SEQ ID NO: 608 - protein, 445 aa, synthetic construct
  REGION 1..445: note = Synthetic
MEKKRESAQSSKKTPKKPAKKKKKKKKSKNEDDDEEEEEEEEGEEEKAELKTKKIRLFPNTEQQQVLLKWFGTTRWTYNQCVAACTRKEKPEPAEKKNLRSLFINSNAPDIPTWTQEVPYDVRDEAMSDFIKAFSTQKMLVAQGKHQHFTMKFRSKRRDQSIVVRPKHWKRAHFLDSNKFVGAPLVSAEPLPLTLAHDSRLIRDKCGHYFLCLLLPLDDHLAHTPENELIALDPGVRTFMTGYDPSGKILEIGAKDMTRIYRLCDTMDDIQSRFQQPTTKARKRYRLKRAWKRVQTRVRNLIDEIHKKVTLVLVKSYKTILLPKFETSQMVKKAQRKIRSKTARGMLTWAHYRFQQRLIDKTREYRQCKVVIVDESFTSKTCGACGHIHKKLGGNKVFKCPQCGTCLDRDVNGARNILLKFLTDFPTPKRTGNCALSLTSTQKGA

SEQ ID NO: 609 - protein, 563 aa, synthetic construct
  REGION 1..563: note = Synthetic
VKNNNNNRQRDKGITIEKKKKKKSLKRKRREGGDDEPEEEVGGDAQDEQNDEEEEPTAWGVRRIRLLPTREQATTLRQWVGAARWTYNQCVAAFREGSGAVAENTTAKALRAHCVNSDAPLVRENAAWLLNVPYDVRDEGMRDFRKALKTTFALKRTGHINRFNMRFRSKKRAVRESIVAHAKHWKPGNVWWKRYLHREAVRSTEPIPDTLPTDTRVVYNRKTNKWYLMLLVPKFPKRENLMRSERYDARRNGDEEGSVNHDDQSDRSGDGNSAGKNDDSAGDNQALSAHDTVTAPLAPLATGLTTPPPPPPPPPPVVSFATERTLSIDPGIRTFATCYDDTGYVYEWGCARDRSRVMRLGLAADKLQHRSDDSECRHRERYLLRRRMARIREKIRNLVDDLHRRLIKWIVTNFDRVVLPPFNGHNMNTRGQRKIRAKTVRQMMSWAHGRFRERLLAKTGADGEYPHCHVYVHEESYTSKTCGACGTLHTRLGGCKTFRCPSNECGAVLDRDANGARNILLKFLTEEATYVSSPARPGSGCERLTPVADDDCAFLPKKFKCAV

SEQ ID NO: 610 - protein, 561 aa, synthetic construct
  REGION 1..561: note = Synthetic
MKRKLNESNYVTAESVATTKRKTSEDKLLNLKKHTQSTPSSKILVQDSTGKDTALIPFWTKSSKEWSQKLWLHTRTDCAALDSSSSKEYSRNTMSNSWYTARMRRIRYQTPKNSRKTSSPLLRSLSQRIMENVLPITEKEELKKTRVRSKKETKKVIQKIPAQKAIRIKLYPTHEERMKLNQWMGCARWTYNRCIEYVNNSQKIPDFDKNGEKILLKNGQDKMVDEVGKNMKDFRRFIINNENYKEDNEWVLETPYMIRDAAASELVTAYKSNFTKLKKGAQTKFFMKFKTKKDRKDSISIPCRNWKSKSGEFSFLKHMKSSETLPEDLIYDSRLIKTKTNNYYLCIPKPLDTRNENQVPKKTLGVVALDPGVRTFQTTFDLNSVCTEWGCGDSDRLGRLCHAYDKLQSKWTNVNHKKRYKYKKAGRRIQERIRNLVNELHKKLALWLCQNYQVILIPSFNTSIMSMKLHSKTARAMMTWSHYRFQQRLIHKAREFPSRRVYIVNEAYTSITCTHCGKIHSSLGSNKVYECPHCDMVLDRDINGARNILLRFLTNHELELY

SEQ ID NO: 611 - protein, 596 aa, synthetic construct
  REGION 1..596: note = Synthetic
MCDLLLAIKTNVNLLKKRKFVTLESLVSNKRTTLNDRSKISRNSTQTEKLSPTLAVGSTLKGKAYKPFWNESTAEISKKLPLPTKTACVDTDLNSLNLSVKSLVQKSWFSVKMSQAMEIENLQTTCLPSSTISWRSVMDYVREQTEKNVSLMQQTTQKTIKVRLYPTLEQRRKLNQWFGTARWTYNQGLNAIKNGASISLKELRKQIINASNYKEDNKWVLQTPKQIRDDALRDLIKAYKSNFAKKKKNVDHRFELKYKYKKAPQDSVQIQKQSWTGAGRIFPSKEFMNDTIIRSSQNRRKRKINNDCKNIRQERNSCPDELPTDTRLVRTKSGKFYLCLVKPLSFVDQKHIPRIMEKNSIIALDPGDRTFITGFTNSGQILEVGRADKQRIIRLGCHLDQLQSQYSNKDLCHRNRYHMKKAAQRVRDKIRNLVDDLHCKLAKHLVHSYATILLPTFQTSKMVQKNHRSISSQTVRSMMTWSHYRFQQRLIHKTREAYWCRVMLVDEAYTSITCGKCGFIRSKNKSKEFSCPQCHFEADRDIQAARNILLRFITLHSSVNSNGLTLGVHPFLNYDTIQPKTCYDSLILDKSNHKRL

SEQ ID NO: 612 - protein, 588 aa, synthetic construct
  REGION 1..588: note = Synthetic
MDAAALRIANEEERNQAKRRKNQQNDQEEDQEKQQPPAQKRLREELCDPSTYPNKKKKTESTTKEQAIPKRKFDEQPKGSPKRGKKRPREDTKEETENQKAKRIAKEKVELFRLENGVGRNGAQPKPSAKHVKDDKDTQTDTFQDNVSKPHAKSDQEKKPLIEFKVRNVRMFPTSKQRAILRKWFIGARWTYNRCVEIFKQYGTAGAKLNVMRQTTVNAGVHAGKPTEWVLGTPTEVREGAMRDVLKAIQSNFQKMRKTKDYSFELKFKDGKGSDSILISKKKCKLEAELLSAIKMEKHFKPNFDHDMRIVWKRNTGTFLLSVPVPIEQVCTDEAPHGLSPIDGVIALDPGVRTFMTGFDPSGKTFDWCGGDQAKLRRLQRHLRRLRRDIQSTEIRHHQRYRLRKAAARLEERIHNLVDEVHRKLTKWLCENYRVIFMPKFEISRMVQSKKLSTDTKRGLYVWRFHEFRQRLLAKAREYPWVQVFIVNESYTSKTCTHCGWFHEKLGSAKEFMCDNCKSKHGRDEGGARNILLRQLGLLLKDRLNAEAALSGRLPLGPSEVTPSGVTEEDVLLITQQKFEFIKNFEFK

SEQ ID NO: 613 - protein, 328 aa, synthetic construct
  REGION 1..328: note = Synthetic
MALSKTFPHILSTPEAIRDQAISDIIASRKSVYTNRQRGNTSGAWSTFNYRTKRDTHQMVRVPSRNWGIHSSGFFADIYHASKLKSRESLPRRLQCDSKILKDRLGRFFFCFPETVKPAHTSKAPDPSKHCTIALDPGVRTFMTGYDADGFVVEHGAGDISKIRNLCLSYDRLVSKMHGGATKHKQRCNMRKAALRIQRKIRTRIDDSHRRLSKWLCKNYRAVIIPTFGVSGMIKKKKRNIGSRTARAMCNWSHFRFRQTLMAKSREYPWCRVLETQEPYTSKTCGQCGQLNQKLGSKKTFVCPSCGYKGDRDVNATRMFLVALLHCE

SEQ ID NO: 614 - protein, 352 aa, synthetic construct
  REGION 1..352: note = Synthetic
MAFGAARWTYNKCLERIIKAECKVNVKDLRKLCVNNANINDKWLLDTPYDVRDEALRDLYKSYQVDFKSGKAFKKQFRSKKDGFQTIVIHKKHWNHKKGWYGALKTGLKSAEPLPKTLYTDSRLQMTSLNEFFLVIQTPPQYDNQVREDIVALDPGVRTFQTCYSPSGKVTEWGNGDMKNVMRLLKAHDKLQSLCTKVNHSKRYKLQKAMKRILKRVRNRIDDIHRKCIKWLLDNHGLILIPVFGVKKMASSKCLQKGTRRALYAWSHFLFRQRLLDKAKSYQKARVLVVDESYTSRTCTRCGCVNSKYSSKSFLCAKCGLDLDRDINGSRNVLLKFLTEQGLTASALWPTT

SEQ ID NO: 615 - protein, 479 aa, synthetic construct
  REGION 1..479: note = Synthetic
MDVVQRRNEEKEVNHEKVDLQKIKRRKKMTQANQLKNLDLSTVKESSNRCKLIRVYPTPTQKPILNRWFGTYRWTYNQLIAKSKDRNADTKWADYSKKTVRDFALNADSPLLNEYKWVKETPYDIRDGAMTEFLTALKTNLDKRKKNPSFTFDLQFKSKKKHRQESIPILAKHYKGAGLFFPQLFGKTPLGVGREPLPDKLEYDGRLLQNKVGQYFMAIPQAPLHVILPRQDKEPRKPTEVVHQRYFNESNVDLNIASIDPGVRTFATIYDPGSLHNNQGKWIKWGDKDMGRITRLCVYADRLQSQTDTPRKQRECRGTHKGQTSRMKKAFRKIHLKIQHLVKEFHCKCAKWLCENYNLILLPKFKTKDMASTKGSKKRLIRSKTVRQMLTWSHYTFQQRLIHKASQYPFCHVELVTEEYTSKTCPECGYIHKTLGGNKTFKCPQCHYTCDRDAHGSRNIFLKWLTDQHRKILSGSQQC

SEQ ID NO: 616 - protein, 846 aa, synthetic construct
  REGION 1..846: note = Synthetic
MDAKGKAADSRHRDKHKARVISSSLQPESVGHSLLQTQLLSDGQKQNESLTDRCQEVNGSIPKKTSGRSSKVKPQPQLRKRNPVQAQPIQKIKPRPKRSKSVTPVSRVRTKQETSKDKSLTSKKRTQRTPSSKTSDPASISKERDLLPFWNKYTQELSKKWSFNTKTDSVVTDLKWSNGSSAKLAQNSWFTVRCRKEVRPGQSSMETMETMQKQLIQQQTTPLVTPGMNLQMTSSLLSPSLLRDIMADAQRRTDSRDASFKTAEMKAQERKLNMRCAMELKMQAKKQAEQDQAQEQQMEMEPEIEPEIPSNQNQQVPNANACQQKTTKKRKQRPLPSSPDLINDTKSKPLSNDVIEQEDIKRSKTEHKSTKEGAVKLSKPKIVYNPDKPIAARMTKYKLRPTNEQMQLLKQVLGVTTWTYNQSLLAVREQRAQPVIKSLRDTILNSKAPLLSDKPWVTAVPYDLRDEAAKDFAQAWKANETKKKKGDVYAVHAAFRFQHKFRKSRKIVIHAKHYWGAGIFHPAFFGKQPFRCGEQLPERLMYDATLTVNWLGEVHLYIPAPLDPHSMVGDQPVAPNPIAAIDPGVRTPGTVYDPTNQQYIEWGGNDIGHIYRLAHHMDDLQSRMCSTPEKPIGHHTRWRMKRAWRRMSKRVQNLVKDFHYKFAKWLCLNYQVILLPTYDTRQMIRRGQRRIRSKTVRAMVTWSSATFRDRLIGMSRRYPGCHIVQLSEAYTSKTCRSCGFLHNKLGGNKVFKCPSCQARYPRDDGGASNIFLRHLTMIQLDKEALNSAKENAVSLPCSEEEECVLLTDMDIDVDATMSQEYLSLTAPGLISEDLASEREPLDPFAD

SEQ ID NO: 617 - protein, 489 aa, synthetic construct
  REGION 1..489: note = Synthetic
VTSTALPLSHRRPRLEAQTTEAAETTDAKKRKRDAKLQKAQATRDAKRVAAGVPPPKPRTLKQQERSHTVNSKEPADACRMIRLHPTPEQRATLNRWIGTARWTYNRALAVAKDDGFTLQVLREKVVNTSNYETDQTWVTDTPYPIREDAVRDLLKGVASNVAKKETNPDHRFKMTFRSKRDGDKSITIGSRYIRMGDPLPKGRGQIRLFPKAFGPAPLKTAEPVPDTVLLYDNRIVKTRAGQFYLSVPTVVVPKTLDPTQNGPERVLALDPGVRSFMTGYSPLGLTVEWGKQLATLPPVSALKQKRKTRKQRRKKANKATIETLLYKADQLMSAAATASRSSGGPSRRGLRLAAQRLRDKVRNKTTDLHRTFAKWTCEHFDVVLLPKFETQQMSVREGRVIRNKTVRSMLTWGHYRFRQHLLNKAREYPWVRVIVCSEEYTSKTCTLCGHRHDVGGRKTVTCPQCHVTMDRDDRGARNVYLKNEHLFI

SEQ ID NO: 618 - protein, 511 aa, synthetic construct
  REGION 1..511: note = Synthetic
LDKATRSKKLAETTTKANKKRKRLEKQAATRKAKKTTLVDQPLTRDPESGDGDDPDADLNQPPPPPIKPPAEKVITIRLFPTLEQATTLKSWIGTARFCYNTALGGVLEENVSVNKQALRDFVLNNNQFKRFDLMDWLQDVPYDVRRAAVDELFEAYQSNFAKWKLNPTHTFKMAFRKKKGPGQEGIVIHYPHIRLLPLPVENPVAHCRTQGQLVIYPGSLGKEPILSAEPIPADALNYDCRITRDRLGHFYLLVPRPLNPQPLPESLPSVIRNPTPAEPASRLRIASLDPGVRTFMTIFDVHGQLALEWGKGDMGLIARLLHHLDRLQSKRDHMDTRARQRYRLNRAMERVRQRVRNLVDDCHHRLAKFLCESYDHILIPVFETSKMSRKATRKIDSETVRSMLTWSHYRFRTLLTNKAREYPWVKVHMVTEEYTSKTCTGCGHLKNNLGGAKVYDCSACQSRWDRDVAGARNIYLKKFEGAGTLSQCLLCPGTIWLGNHSRPRCRKWTW

SEQ ID NO: 619 - protein, 210 aa, synthetic construct
  REGION 1..210: note = Synthetic
VFTKGRWLAIFPEPVAVTPTEANGVIALDPGVRTFMTGFDGSRFLELGSGDIGRITRLCQHLDDLMSRIAKEPCRSRRRRMRQAAQRMRTKIRNLVDEAHKQIAHYLTNDYSIIFLPTFETSNMVAKAKRKIKSKTARAMLTWAHYRFKLTLRHQGEITGTTVVDVTEEYTSKTCTHCGHVHSQLGGSKVFRCPECGFNPGTGTVLLESF

SEQ ID NO: 620 - protein, 500 aa, synthetic construct
  REGION 1..500: note = Synthetic
MKEHSKDGMKMDQSRPSELLLGNDDTTLSLMLPSQAVTNVKSLSIPELVVAPTKATSTDGLPDSQACIPKPKLSQKSEVDSTSRERKCLLYWDKFCQEMSAWLSLHTKTDWQDMPDGRTGLTCFDGGANKTGVNSWFSIGQVSVQNEKWLRTSSPSSTALAPDSSEQVNTKLRSKKIRIYPSPELNKVWRKWLAACRYCYNQAIALQKSGKRLSKLKLRNEVMQSDLPEWVKETPCHIRQNAIFDAHLAFSASPGARFRSCRDSSQAIKFNDANFSSGSWYPRLTKGLTFKVSEPILSTCDQGTQLVFSKGQWFAVFPKPVAVTPTEATGVIALDPGVRTFMTGFDGSKFLEFGSGDIGRITRLCQHLDDLMSRIASCPSKKRRRRMRRAAQRMRIKIRNLVDEAHKQIAHYLTRNYSLIFLPTFETSDMVAKAKRKIRSKTARAMLTWAHYRFKLTLRHKRGNNWNHSCRCDGRIHQQNLYSLWSCAFPARWLKSVPMS

SEQ ID NO: 621 - protein, 558 aa, synthetic construct
  REGION 1..558: note = Synthetic
LSNTQRPEKQRRLSELTNEPSAAGMKMAKSKPSKRHQVNADTISSHSLLALHQILEPLCCTPELVLAPSNQISTDKLPHLETSTRKRKLSQKSVEDSTSSAKKCLPYWDKSCKVMSEWLSLPTKIGSQDLALTSFDGSVNNTTVNSWFSTKQTSVQSEKWLKTSWQSFNASVLDCTDSESTKLKSRKIRIYPSLELAKVWRNWVAACRYVFNQAIAYQKENGSTSKLKLRNIIMQSDLPEWVSKAPCHIRQNAIFDAHQAYSASKDCRFRSCCAPQQTIKFNDCNFSKGTWYSSLTKGLRFKASEAIPDTSSYGTQLVFSKGRWFGIFLNEDVAQSNSSQGLITLDPGVRSFLTGFDGYKFTEFGVGDMGRITRLCQHLDDLMSRISKCDNKRKRQQMRKAAGRMRTKIQDLINELHKKVACYLTQNYKIIYLPTFETSQMVAKVRRKIRAHTARAMLTWAHYRFKLFLKQTADRRGCTVIDVTEEYTSKTCTRCGHVHPKLGGSKKFKCPSCGYEIPRDFNGAFGIFLKALRDTASIVYEANSATVALSGNAQTNVA

SEQ ID NO: 622 - protein, 442 aa, synthetic construct
  REGION 1..442: note = Synthetic
LVSTNIDGSVSNLTAQSWFSTQKTYLKKQKWLKTSELYSTASVVDYMDSENIKLRSKKIKIYPSSELKKDWNKWLAACRYCFNQAIAYQKENGSIGKRKLRDIIMQSELPEWVKETPCHIRQNAIFDAHQAYSKSKNCKFRSCKAPRQTIKFNNSNYTKGKWYSRLTKGKDFESSESIPPSSAYASLIIKTKCGDWFAVFLEEVKPSIDNVDGIIAIDPGVRTFLTGFDGRAFIQIGTGDIGKITRLCQHLDLLTSKIGKSKSKRQRQKMRKAAARSRRRIRNLIDECHRQAASWLTKNHSYILLPTFETSQMTKKKKRKIRSKTARQMLTWSHYRFKQVLKNRAELSGCQVIDVTEEFTSKTWRIDCFPVSSRNRETVLICHIHTKLGGNKVFKCPECGHEINRDFNGALGILRSALRDTSVTFSSDAIVVKGDFVSLCTA

SEQ ID NO: 623 - protein, 607 aa, synthetic construct
  REGION 1..607: note = Synthetic
MDQSITFLPESPPTGSGLVPKHLNDGLSQVKFKGSKLLGDKEDTTSIQLSLSHQKKLGETDLLSCMPEFQAALKRTILNNKYSFSSLVIQTQKSSKTSGADSTLKDLVFKPYWTELSAVLASMLSLPTKIGFVALGSILSHGCVLNSKPKYWFSTKRTSAQNKKWLKMYSRSSMSSVVDCMDSGNIKTKSLKTTTYRVYPNKDLEKIWKKWVAAVRKVYNISIEQLNKNQGYTKVGKKGGKHGFRTWLKQSGLIPEWCKSLNVSKILDNASMEAYTAWKGTAKQPKFIGIGKKRKSNPQAGLKLAKFRSVRDQKQTIQFDPTAYKGGRWMVSTTKHLPKPKFKGNNHCILTDGSTELTYNKGRWFAHFPVEFTTEPTLTRKVVALDPGVRTFMTGFDGNQFLEFGIDDFQRIAKLCSHLDKIKSNHDQAKGHKNKHKRYRLKAAMERLRTKIKNLRTEIHKQVASYLAKNYDVIILPTFETSQMVVKKKRKLRSKTARAMMNWAFYQFSQILEHLCNRYGSRLVRMTEEYTSKTCTKCGHIHRKLGSSKNFKCPKCNYEIHRDFNGAVGIFLKAMWDTTFLNNVGDVVLSVSDTIDSNVYDVMVCQG

SEQ ID NO: 624 - protein, 586 aa, synthetic construct
  REGION 1..586: note = Synthetic
MSALEKQLEFWEFPKEPSEDGKKLEKSRPFARQETSADTTLQATQLALVGIGLPYSMPVSLPQNIKLTSIVSVNISKVDILTQSLSMKLEADSTTKDKNFYPYWNGSCQDLSNVLWSHIKTDSQDLALSCLIGSVPKTLVNSWFSTKLSYLPNANWLTTSLQSSTVSQPDCTDSENIRLKSLKIRIYPSPSLHPIWKKWLAASRYCFNQGIAYQRKHEKISRIDLRKVVLKNVPDWVKETPYSFRVQAVYDAHEAFTKSRKNGTKLADAGRFRSVRDRLQSIKFRPEDYKNGTWFPECTKQFSFQVAELIPSIDVQYQQKQKDGSYKTRIRKQTWNASTQLVYDKKRWFAVYPIEFKPEQSNRQSMIALDPGVRTFLTGFDGEKFVEIGGKDIAKVYRLCKHIDNLISEKSKLKGRKNKRQRQRIQARIDHLLVRVRNLVDEVHKKAAKWLSSEYRLIFLPTFESSQMVAKSGKKSRKINSKTVRQLLRWSHFRFKQTLKFHALKRGAKIIDVTEEYTSKTCTSCGHVHAKLGSSKQFRCPRCRHTLPRDFNGALGIFLKALRDIASVDSSSISVLCPTSSGIVRA

SEQ ID NO: 625 - protein, 386 aa, synthetic construct
  REGION 1..386: note = Synthetic
MDFESIHLKSLRIRVYPEKHLHQIWKKWLAASRYCFNQAIAKMRKHGLISKYDLRKVVLNNESLPDWIKESPYHLKVNAIYDANAAFKTSRKSGTKQPSCGKFRSIRDRIQSIKFRVEDFKKGTWLPSATKGLNILASEVIPTTNVEYQQKQKGGIYKTCVREQSWDAETQLVYDKKRWFAVFPKDFKPEISKSQSIIALDPGVRSFLTGFDGEKFIDIGKGDITRIFRLAQHIDRLISHKTALKSRQNKYKRQRLNKKINRLFIRIRNLIDEVHKKVAKWLTTEYRVIFIPTFESSQMVAKSGKKKRKLNSKTVRQMLNWAHYRFKQTLKFHGLKRGATVIDVTEEYTSKTCTKCGHVHQNLGGSKHFKCPHCSHSISTQNFYMN

SEQ ID NO: 626 - protein, 607 aa, synthetic construct
  REGION 1..607: note = Synthetic
MDKHEWKIRNGSTHHKQLTLLDVTLNQSVDGKKKGKSKLTGHQEGKEDLNAQKSSSLQGLQLSLFKSELSATGEFQPMDNETTWIDRLISWAQDTQRQKLFQKLGQDSILGGTSLLPYSNELCQEIFNALLLPIQTGFVDSASTLLNGCVQNLIANSWFSITANSAPKRNSLTICSPSSIVSVQGYTDCENTENNSLLNYGQNPFKKSQNIPPNLSVKIPVFPCKELHLIWKQWLAAYRWVYNQCVAFFNSGEKLPKNVSLDQHIQNLQKEKGSVWTACLGKTRQEAVCEAQSAFRQARKAMTRKPKIERTTVTIRFRSCRDNSQVIQFKNDAFKGGTWFVSKVKGLLFCTASGYELPTECVYGTELAYQRSQNGYQWFAIFPEYKEPEISSSQKVIAFDPGVRTFLTGFDGETILEFGKKDIGRVIRLCLHLDKLIGRKIKASGKENKKFRYKLGQAIKRVRIRIKNLINDMHHKVSSLLVQNYKVIFLPTYETSQMVLKAKRKINRKSVRSMLTWSFGRFALTLEQSCNRHGVLLVRTNEAYTSKSCPKCGTVHSKLGSNKTFTCPHCKFTLPRDWVGAINNLIKPVANLAFEIQDNKLVISCAG

SEQ ID NO: 627 - protein, 576 aa, synthetic construct
  REGION 1..576: note = Synthetic
MSPQKRQPNITASRSQLLDDGTKTEGSTVLEPKAIREGSALKEKTRKVSPLSVMHGSLPIPNEMTSTDKLNFYGQNTQTLKLFQKLDHDSILGGANLSKYWSEYTCLISQHLSLPIQTEQSDLGFHYLNGCAKKVRSNSWFSMNASCPQNKSLSKISCPSSTVSLLGFTDSENLKSKSRKRYKTKSRNQTMKLTPNSVNKIRVFPCKELHKIWKTWLNAYRWIYNWSIATIKNGYVGSAYDLQKLARNSDRPEWVKTLPGHQLQEAVADAIDASKQAKANGGFAKFKSCRETSQVIKFKAGNFKKGSWYLTKVKGLSFRSPQGFPDQCIYGTQLVWIKGKWYGIFPEYIEPTPTTVDKVIALDPGIRTFLTGFDGFSYLEIGTGDIGRIQRLCQQLDRLMSRIDLSSAKRQRRSRSVRQSAAMRKASHRLRQKIQDLIKDCHNKSASFLVNNYKLIFIPTFETSQMVVKSARRLNKKTARNMLTWSHYKFRQHLIQMADRNDVRVVLVNESYTSKTCPECGQIHEKLGGNKKFQCPKCGFSLPRDWNGARNIMIRALSATTTRFSSGAIQVIPADE

SEQ ID NO: 628 - protein, 577 aa, synthetic construct
  REGION 1..577: note = Synthetic
MKQLTLWEFASEPSDDGKPKVKSTRSKRRQDNGGTTSKSSSKKNQKTEEDAPLLSMLASLPDLKNQTLIDKLKDYQCSTQALKLLKKWEEDSILGGKDSSLFWDEFCKVMSELLWLPTKTDLRDLALILSSGCVSNLTAKSWFSTKSVSLRTKNLFKISSPSCTVSPVGFTPSEDLKTKSSRSYKLKPRHKTAKPKPNKTLKIRVYPEPELHQKWKSWLSASRYCYNKAIAALKAGEKITSAYSLRDYVLGLDLPDWVKSAPAHPKENAIFDAWDAWKQAKSAKGESSFRSCRQPVQSIKFHRVNFNGETWYPTLVKGLNFRASEPLQKTNFATQLVRDKKRWFACIPVLEEVEPKELDKVIALDPGVRTFLTGYDGESFQEFGGADIGRIQRLCSHLDNLLSRASKACRKQKRRMYQAANRIRIRIRNLVDECHKQVANYLTSQYKVIFLPTFETSQMIVKSKRKLRSKTARQMLTWSHHRFKLTVKQAANKRGVVVIDVNESYTSKTCTKCGHQHSKLGGSKIFKCPSCGHEHDRDWGGARNIMIRALRDGSFALNLSVEGIAIASDVFVHRCTA

SEQ ID NO: 629 - protein, 228 aa, synthetic construct
  REGION 1..228: note = Synthetic
MPGDFSVILDRGRWFITYTIESEKSVNNNEQAIALDPGVRTFLTGFDGNQVLEIGIGSISRIVALCRRLDRLQSEIAKATGRTNKRKRFNKRKLAQQLRIKIRNLVDECHKKAACYLTSNYSQVIIPKFESSKMVYLAKRRINSKTARNLLSWAHYRFKLRLKTQGVLRGSQVIEVGEEYTSKTCSRCGHIHPKLGGSKKFTCPNCLHKIDRDTNGSINIFLKTISGN

SEQ ID NO: 630 - protein, 591 aa, synthetic construct
  REGION 1..591: note = Synthetic
MSRREKRCKSYKSQKKPLETGIKQEKYLQLELPLDIDVTTSTAYSIHSQPKKEKLSFIAESVPINSETTSTDKLTISNHYSHTEKSSKKLEVDSTTNEKVYKPFWDKFCLEMSSKLYAAIKIDSQDSESNLSTTSASKTIVNSWFSTALICLQKENSLKTSWQLSTSLAQSSTDSESINKKSKKIRIYPEANLRLVYRKWFAACRWCYNQAIAYQRDCFIKGKKQPSKYQLRDIILKSCPDWVSICPYSPREESVFDAKTAFSKTASKNKATPKFKSCREPVKSLSIGSKYWGAFYSGKGKNKQIGGFTHYATTKVVINNETFAIKDLQINAVEPLCEEMPSEFTILLDKGRWFICFAIPFEIQTNQRRNCIGLDPGVRTFLTGFDGENILEIGNGSISKVAILCQRLDKLQSQITKSKGRANKRLRWKLRKQSEAIRTRIRNLTNEVHSKASALLTKIYKHIFLPTFETSQMVVKKKRKLRSKTARNMLTWSHYRFKQVLKFHALKRDCVVHQVQEEYTSKTCSKCGHVHERLGGNKKFKCPSCNHEIPRDWNGAINIFIKSFNDLVNASTSVEAGQDIARYMVETSTCY

SEQ ID NO: 631 - protein, 563 aa, synthetic construct
  REGION 1..563: note = Synthetic
MPHRGKHHKSFRSRKKHSETGIGTEKYEQLELPLVIDDTTSTPSLIQTAIQESESSTPESAHISKSQTLNGKPTICNPCSQTQNLSRKLDQDSTTNAKGFYPFWDKSCQEMSKKLWSATKTDLSGLVETLSSGSINKKIANSWFSTFVTYLQNEKWLRISLPSSMSSVAGSMDSESTNLLSKKIRVYPETALAKTWFQWISAARWCFNQAIAILKKEKIGKYDLRKTVMNMAPSWVIKTPYNPRQLAVFQAYEAHKAARKSGGNAKFRSVREPVKSIRFQKNNWRKGTFYPTQTKGLRFKANEPIINKMHHEPTLVLDRGRWFICYAIDVPKLEPLNSELAIALDPGVRTFLTGFDGQEIWEVGLEDMGRIYRLASHLDRLLSRIGLSKGRQFKRLRYCLRKAAQKIRVKIRNLVDELHRKAANYLCTKYKVIFLPTFEVKNMVKRGKRRLSTKTARKMVTWSHYRFKQTLKHQAAKYGCVVVDVTEEYTSKTCSKCGHIHVKLGGNKRFACPSCGHNIGRDLNGAFNILLKALRDTSTSGVIASFQIVPYSETSSNCKIFPG

SEQ ID NO: 632 - protein, 606 aa, synthetic construct
  REGION 1..606: note = Synthetic
MDTHYDDNLTRHTTHVSQKIMSDLDLRIRILKKQSCFLRFVVEVTIYKSDGVGRVECGMAQYDRLDKVEPYSDDLTLEWGKALPSPGTATIENVEDPTQWPPGVRKMAGRTEGDGFTPRWFNVSVSRITAKPPSHVQGDLHSAMTRANAQRPTNKKTVTHTLPWTQGVDKDGKDDNGELMRVKTVRVLPTQTQKQTIGQWFGGFRFVYNRCVALSHECFCAKTKMPGLTELRQRFSNADSPLVETNVWLQSVPLEIRNGAVQEFVSAHGKEVKRVRDFNKKNKKRNKGTTAAISFELSFKTRKGKQSIPLLKGSWGQKRSDSRYRDVLRSNVLKATEVIPTPRNTYRLTKGNTGRYDLRIPYMQAPSQENQVLEGRHSTVAIDPGVRSPFVMYDADGLVVDVGAGDMATKVFAFKYAADRLQARLTKNAEGKNNKTKRRRRRKAILRTNKHIRGLVDELHYHVIQWLVDTYKVILIPKFGVAQMVQGRLNKTTKNHMLTWRHYVFRQRLKEKAALVPGCTVIECIEPYTSKTCGQCAHLHQKLGGRKVFKCPNPTCGFVADRDAHAARNILMRWLTLMGLSPTKRKRVASLWDRDPDPPAKRQRRE

SEQ ID NO: 633 - protein, 375 aa, synthetic construct
  REGION 1..375: note = Synthetic
MVESLKGKRSKLGDLRCKFVNNTSEFVKNNPWLANVPADIRDQARRDIANAVMSNKAKQKKNPKHRYELQFRSRKDKQQTLILLKKHWTRKRGQYTDCGLSYASYHVAGSRSTEPLPKQLACDSHLIRDRLGKFYLCLSELAAQNDEDEGERKTPPAKFVAIDPGVRTFLTGYDPSGQIIEFGAKDMGGLFRLGLHLDRLQGKIAANQKKTSRNRMKKAAERLRQRIHNLVDEVHKKAALYLTTNYTQILLPAFGVSGMVQHHGRKIHCKTVRQMLTWSHYRFRQRLLHKAKLASHCQVHVVTEEYTSKTCGKCGHVRPSFASKTFVCPECTFRADRDYNAGRNILLLELTKHGLSAPSIKKRNKRLRALSLGSS

SEQ ID NO: 634 - protein, 485 aa, synthetic construct
  REGION 1..485: note = Synthetic
MTSASPLDHNPSWANLTSSTWFTTKLWVPANDCSTFTNQWLNLPRPPPSPLPPDLTSKNPRKRGPTTNKNGKDPKDTAARMMKTQIYPTPEQSKVLGQWCGVVRWTYNQCISYGKKNSTNPTPKELRDEFVCQEVIEDKPWLKVVPALIRNEGVRDYIKAVTSNEAKKLNPKNNLKHYEISFRSKKKLHQETLSIPGRYPYIYDSNPNEVHIDWPLFPGPLRLAESLPLQYFTPEQRRGNKKRCFYAVSIIREKTGKWFLALPLQLDHVFPQTLPVSHYRPPATPTNRRVVALDPGIKPFIACYSPQGEAFHIGTPDDSAKLEKIAWQVDSIQSRWTKEQAKKKRKLKKAARKRRRRHRNLQQEIHRKAAKLLVANYDDILIPSFETSKMTQHDERVLKSRSVRQLLTWSHYRFRQVLTAKARERPGVRVLVVSEAYTSKSCGQCGHIHDRLGGNKIFKCPECQFTIDRDLHGARNIFLRNMGYL

SEQ ID NO: 635 - protein, 470 aa, synthetic construct
  REGION 1..470: note = Synthetic
MTSRTQYQAKKRKRSNSKTTKPYWNEDAAHISQQWGLNTILPTAAKNLSQKITSDSWFSVVKHPQVPVINDSLNLPLSSGVKEEITRARKIRIYPTNSQRETLKKWFGCQRYIYNRALKLHRDGMAMTIKGLRQTLLNRDTNILEPQEQWLNDYSYDLKDEALCDLVKNYSYNMAKYKQTGMPLKLRFKSKKAPIQTLSVLEKHWNKRTKSFWSEVFSLSNFRGTEPLPEELPGDSRVQRTRNNKFYLVVPLAGEEIARKSPAEKFIFIDPRVRTFLTGYDSKQTVVEMGKDAVVRIEKLKRRRRQLQSKLAKLRKHKKRQNHRKALHRLDDKIQHIVRDMHKKTASYLCKNYENIFLPKLNYHQCTRLTRKTRSNMASLAHCSFHDRLTMKAEQFHGASVHEVKEDNSSKTCSSCGNLKDDLGSNKIYSCSSCSSVFDRDFNAAKNIMLKYICEHLMASGGSSICCSLS

SEQ ID NO: 636 - protein, 426 aa, synthetic construct
  REGION 1..426: note = Synthetic
VKAVKKEKRDLAYARKRQKIIETETPEEKFIRLEKERKARIKQQKKDEKDDTGKSIRIRVYPTTEQKARLKGYFGCARFIYNKCVRMYLQDPNVTMQQLRTAIVGNPNYTTSDTWVLEYPFDVRDEAMRDFWKNVVSNREKGGTFTMKFKRKKAHTKQSVSVLAKHWNKPRNWYSWLFQPAVLESHQRLPQELKYTARFKKTHTNRYYLCLPKPLEVMVDNQAPNTKCIFFDPGSSPILTGYDLEGVVYIFGEKDMTRIGRLLHYKNKLRSKSDKATTHKKRYSLKRAYLRIYEKIKYLMTDFHCKVTKWLCENYTHIFIPRLNFHKMTKLHKKPKERLASIEHCALVDRMVNKTREYPWCKVTQVNEAFTTKTCGRCGTQNHHVGRSKTFHCVNNECNLVCHRDVHASVNILLRYFTKRAVTHEA

SEQ ID NO: 637 - protein, 565 aa, synthetic construct
  REGION 1..565: note = Synthetic
MNNFKELTSIGEILQEYSLKDLEDCNIQPLDLIFEYSYKGPGENESIPLTKEEEDHHKVLIKQKIARREANKTTRRLSESSWSSLIKQKAKNNKKIPNSLNVQENKEMVSKVFNISSITKESNSSLHYNLQASSSTLSKFLLKKDSEKKKKKKTKSKKNPELEEKMRAIKVRIYPSKEKKETYKKLFGYQRKLYNSCLEYIKNNNGLYKLQDLRENFVKASGDFVKQNKQEYPDVPNEFRDNIVLDLIKNIVSNEKKTSKTGKSFTIKRKTKKLGKVNSESFGIQGRTWNKAKTVNSWWFKTFKHELKFKDKTSKFPKINHDIRFLRTSSNKYYICIPISYTEDDLLDNQDSIVTCDPGERVFLTARNTRTNSIDEIGTNIREKIEKLLRPIDFIKEELNKKKDTGKFFHDRKKRYKLQKVKLRRLEKIQNVVSDFHKVIAKNFCENNSLILIPKLNFHFLRNLNKRSKRVLQTISHCKLVDRLKTKSQQYKNCNVQVVREDYTSKTCSNCGNINYDLGSSKYYVCSKIACGFEEDRDHNATNNILYKFLNEKIPITKLAELVCA

SEQ ID NO: 638 - protein, 635 aa, synthetic construct
  REGION 1..635: note = Synthetic
MRLTNITRYLLPQNKSCPSTKSQDKPCKPGLKKETFSIESLQMEDTSITETKCKKFLKQALGKKRPRESKSVTPECLQPSRKKTCKDKSKNSKKRTHITPCTKTLGADSTGKEKTFSGSWLKSVQGWSQRLWLCTETDYVDMDLSSFNSYANSFKQNCWFTVETKKRIHTSPVNKNCPKTCSPSSTYSWQETMENVLLKTKKEEMEKENMKKKKRVQVKAKAKNQKTIKEPAQRTWKVRLYPNKEQREKLNKMIGTYRYIYNQCVDYYNNGVGEIPTIKELRDKFVCVESMKQYKNQWPECLPWDSRDEACRDFIAALKINWKVYDEKVEKKTFELTGQGLNQTQAKQQAIKIINIFKMRFKSKKRKKIQSFFIRERHWNQKTGGVSWMKEIKTKESFDIRYDTRVLKDGVGKYFILVLKPLEPVKAEERRKIISIDPGERTFLTCYDPEGKIFEFGKNDSDSLIKLGMKADKLQSLHDKKQNNESLRFNSKKRKNLKKKFQKIKYKIQNKVKDCHHKISKYLVQSYDNILLPSFSTSGMIKKEDRRIGSKTVRKLLTWSHYKFHQIIQSKSKRFGAFVIPCEEHYTSKGCGYCGDINNELGESKGFECPKCKFKSDRDINASRNILLKYFIENS

SEQ ID NO: 639 - protein, 305 aa, synthetic construct
  REGION 1..305: note = Synthetic
MEHQLIKKGMGIDQAKEQAKTIIKMFTLKFKSKKRKKIQSFFIRERDWNYESGNVSWMKQIKSKEPFEIKYDTRVLKDGVGKYFILVLKPLEPITVSERRKIVSIDPGQRTFLTCYDPEGSIFEFGKNDSDSLIKLGMRADKLQSLHDEDENDKSKKFNSKKRRNLKKKFQKIKYKIQNKVKDCHHKISKYLVQSYDNILLPTFSTSEMVKKNDRKISSQTVRRLLTWSHYKFKQIIQSKSKRFDAFVIPCEEHYTSKGCGNCGEINNELEDSKEFECPQCKFRSDRDINAARNILLKYLIENSQ

SEQ ID NO: 640 - protein, 564 aa, synthetic construct
  REGION 1..564: note = Synthetic
MTIKTKKRKRETKTGLVKKKRKINDNSIQENKITERNRWCSSVKYISPFMTSVSFEQMNTLRRKNKSYDSYLKRTTKNSWFSVIQTKFNGKNTYLDDFLQDHFIKKEKIEDDKLKSKYEKIEKKDKKPKKKTNLKGKSNRTKKTDKKIDRKQLIENKRKQIEAREKQSAGQSRKIRLYPNKDQRKTLADYSGTSRWTYNQCVRYWYECDKDKNLYEKLDHLDSNTLRTKFKNKNSTYLQKYDWVFKVPACVRDESILQFIVSKNQAQNKYEKMKEENTGNVKFPQFEFKSKKNKLQESFYVPHREYYQNQFKWMRQIKTKEKFTLKHDTRVIREPTGKYFILLPEPLKQEIVAPLSDNQRVKVASIDPGVRTFATIFDNSGNAFEYGKGDIGRIFRIVYYMDKLQSKMQMKKRNGSYYHNSKHRYNMKKALTKMRQTIKNMVKDFHHKVSKHMCLNYDLILLPEFNTSQMTLKRNRRIGRKTTRQMLTWSHYKFKQILLHKAKRYNKVVQIVREDYTSKCCSQCGNINYKLGGQKKYKCRQCGFHGDRDINASKNILMKYIIEN

SEQ ID NO: 641 - protein, 408 aa, synthetic construct
  REGION 1..408: note = Synthetic
VRNERDHERLRKLFGTVRFTYNQCVDYLRQNKDVRATKKLLRSLFVNNDSELVKKNEWLLETGYDIRDDAISEFMTGMKGNFTKLKQKTQKFFKMNFKSKKRQRSETFYLRHRWIEQRDNTITLNLPKMSPIVLWTSKDINRAPILIDCKFQRAWTGDYYLCVPHAYGVESQDSIKHENLRVCSLDPGLRTFQTIFDASDSCAYEIAPRDIQRIVRLCVGLDKLSSKRDTASDARRRYNYKRAFRRLAEKVRNLINEVHKQLAKFLATNYDLVMIPKFDTFQMIRKSTRKIHSSSVRQMTTWAHYRFRERLIFKCRQYNCRVAVVDEAWTSKTCSSCGHINYALGANKTFACPACHVIMDRDVNGAKNIFLKNYEALGLCLTLGPTPSVSATEQCTEAAMPLLNDNWF

SEQ ID NO: 642 - protein, 601 aa, synthetic construct
  REGION 1..601: note = Synthetic
MFLFIYYYLNVFRIVYFKYLLLCLMLNSSKLALLKKTLIFPHKHLENGQTQESLNLLKSKTQGQDYLITNASSTLSVQTNSLVPLREKEKEEFVMQESLPIIKKKISLDKQNTLVNDTLITKSSQILPQVLTGKEKVCKPFWTESSKNLSKNLWLPTKIDYQDSDLTLFNGSAINLIANSWFSTNIQTKTQNSTSHKMYYPLLTSSQQKIMECDLLCTEKKEILRSKKIKIYPTTSQKKLLNIWFGSCRWVYNQCVNYINATKKNKAISEKILRDKFINGDKKAAFSQNVPFDVRDEAMRDAIKNMKSNYAKQKKSNKKYYFQLKFKKKKNNVQSITIRQKHFNRKTGMYSWISQLKMSEKIKTMETDFRILKDLVGDYFICLVNKKNSQSESQACKFSKTSMNGVISLDPGVRTFLTGYDPVRKNILNLGTNVQTISEKHQKTIDILSKKIQTTKDSKKKSRYNKALRKIRRKVKNQVKDMHHKISKFLCTNYKTIIIPEFRVKDMVSTENRKLQKKTVRGMLSMSHFMFKQILLAKSEQYKYCKVVLVTEEYTSQTCGNCGTLHKTLGGSKNFNCSECKYPTTDRDVNGARNIMIKTIQ

SEQ ID NO: 643 - protein, 532 aa, synthetic construct
  REGION 1..532: note = Synthetic
MKITNPLKLIMVNNKETNKLSDVNHVNNDLVSQCEFIDKLWLPNDSNFITLTPGNKQSKENIMYNSWFSCKKTSKIHNPDIGKLMVKAIINDDISSDDLRIKIIRLNMGKSPIYKAKIKEAIYVTRALYNMCIDLCCREIDPIPVNLKTLREILTGKKETNILPINLKEVFDKVPSGIRDEALRDFVKAYGIQIDLLKRGVITHFEMHHKKRKNSLQETIVLHHKEIRRKENGDKYCFPTKWGKEILNTYGEKLPDVINHDCRLIMKTIGNNEKFYLAIPTDVEVKPKVKNLNAVSLDPGVKIFQTTYDTEGTSYLIGENDANKIDKLSKIAQRMRDGIKRDWIGGDQIIKNGKKKLTNKKRIFRTAKNEKERKGLLKAAAKIEHKIKNKISDLHRKTAKFLCEKYDTVIIPNFRVKQMSEKKDENDNWKRKIGKETVRKMINWGHYSFRQLLIAKGKVTGTNVYVGTEEYTSKTCGNCFWINSKLQGERELKCEKCNLTFHRDVNAARNIMILNCKKSNLKQFKLKLNIIC

SEQ ID NO: 644 - protein, 326 aa, synthetic construct
  REGION 1..326: note = Synthetic
MRHKKRKNSLQETIVLHHREIHKKENGDKYCFPTKWGKEILNTYKEKLPDIINHDCRLIMKTIGNNEKFYLAIPTDVEVKPKVKNLNAVSLDPGVKIFQTTYDTEGTSYLIGEDDSRKIGKLSKITQRMRDGIKRDWIGGDQIIKNGRKKLINRKRIFREVKTEKEKKGLLKAAAKIEHKIKNKISDLHRKTAKFLCEKYDTVIIPNFRVKQMSEKKDENNNWKRKIGKETTRQMINWGHYSFRQLLIAKGKATGTNVYVGTEEYTSKTCGNCYWINNKLQGERELQCENCNLTFHRDINAARNIMILNCKKSNLIQFKLKLNIIR

SEQ ID NO: 645 - protein, 500 aa, synthetic construct
  REGION 1..500: note = Synthetic
MVRIVVTKKTPTGTTRSIKIVSRVQVPEGPSTPNWDKEVSKSLWLPNETDCNTSGLKGSSEKILKNSWFSVSKISSKDTNLPKVNLPKVTSSTSQVQESSLRIKKYQLYLTKEMIRTYKVWFRATRWVYNKCVEYYHENLNEKISLKQLRDYTINSKTINHEPHIMDLLSQVPYDVKDSAVRDFMNALITQKKLVKEGKRKSFNMKFRNHKDLQSLGVSHSNIKNRNGILTFFPTFLGRNVQALRCREKIPKITHDVRLSWNTRNIFILHVPTDVPVGTERISKGNICSIDPGEVIFATVYGSDGYSYLIGANDSKKVDKIASIASRMRNGIKRTLKLDETKEYFKVSGPNNKRIRKHLKDKAKDLETKAKNLISDIHKKTVKFLTKKYDTIIIPKFETQSMTKRLDPQGKWKRKIGKGTSRRLIRWSHYNFRELLKAKGGNRVIVGTEEWTSKTCGNCFTINNSLGGSREFKCSKCGLKIHRDINGARNIMILNWDKIN

SEQ ID NO: 646 - protein, 587 aa, synthetic construct
  REGION 1..587: note = Synthetic
MPQDICLQLKLPLNTVSAPLVSEIGLTMIKLKLRELRVVKDFTTSPMSENVSEDLIINKQVPQSHILVSPLNTKNKIFKGKLNISKKNTNMKKSSQILVQDSITIEKVSKNCYPKWNLEMSKKLWLPTKIDCVDMELNSLKESSERIIRHSWFSVTKLVAKNQNLEQIYSTSATSSSLKEMKENQLNLEMKENQCLQKPLLSVRIHLYRLNIDKELQKIYKNTFDVCRKVYNLCVDWHRQNPQEIPKLKILRSLFINSDSIYNDIFKEVPYEMKDGAIRDFITALKTSKILVKSKKVKFFEMKYRIKKRNQSLNIPHKFINYQKDKITNKLICYAFPTFFGKKSLNSKKIIKKPKHDCRLLWKDDYYYLAVPVEKKIKEKKKKNIQCSIDPGERNFNTLYGTDKEAFLVGKSFKIDKLSLTASNLRNGIDKYGNKINKRKKRKNVIKIAGNMERKAKNLIKDIHHKLCKFITSKYSNVIIPEFKTQEMVKKKEGKIRKIGNGTARRLLRWSHYKFRQLLIAKGEINNCKINVESEEWTSKTCGNCFNVKENLGGAKQYKCLNCKVKIDRDLNGARNIMILNYKKMDI

SEQ ID NO: 647 - protein, 650 aa, synthetic construct
  REGION 1..650: note = Synthetic
MSHTGNLKTSTMYNRKLSENGLVKDLSAINLFSTLLGLPGFTTWTPSESLFADPALQPLMNLILPHPKSAEYCMLVYLVKNNQMTLLDKLKYLKHDSLTQKLSVISGQELIIRNPASPSWWTESVAEKSDKLWLPTKTVFLGSDMNCLKECVSTMGVKSWFSVKKTRSTLDLNLKPKSYKRTYSASLMSSLPDKTVEGQLNSEKKKEATVNGIMKIRLYPTQHQKEKLQQIFNANRYAYNKIVEVIGDKLFDLNLKTPEFTLIKKHARRYVVKTDMRKMKSNNELNVSDDIINAPEEALDSGFRDVIKARKSTIALSKAMKDKTGKGFKLNKLKYRSKKYSYSETIEIKSRGVKQVENNGLFVKFWPEFFGPEKVKKADASGPPVKKRRTKIQIAEDKLKKENEEKRIEYMKQIRIMEPLPELISSIRLQKIKPNIYYLCIPVIKQTTPITTNKICSIDPGVRTMLTVFDPEDKQVYMIGNNVDELVKRSKIIDKMKSRLRNFKGKRNARYKLKKEMQFVQRKIKNMTHDMHHKTSKFLSDNYKTIIYPKFNVKGMCNKKYRNIGKDTARRMYLWAHYKFRELLKYKTALRGGKVVDCTEEYTSKTCSYCGRLNHALGASKTFKCPFCKYEVDRDVGAARNIYLKNHHLV

SEQ ID NO: 648 - protein, 420 aa, synthetic construct
  REGION 1..420: note = Synthetic
MAKEPQTLENKEVKQVVPAKVLSIPSKTKKKPPPNAAIKIKLLPTPHQRERLNTLFGGHRYVYNEIVTKATDMFDIEPKEFDTKYRYLAKKNACDEKVKDIPEECLDSSFRDVVKAIKTTRALSKALKEKIGRGFALKCLKKKDLSGNTSIEIRQRSLTIMDKQVQFFPTYFCNASDKIDKRNQDKRIKTAEQVPIGIHSVRIAYHDYNYYIIVPKRSEFEKTLGGVCAIDPGVRSLCTIYDPSGITFELGNNQEVLARKCNQIDSISKAMKKTSNKQQKSRLKKKRKAIYKKITNCVNDANHKVSKIISKTYSKVLLPKFETQQMMIKENRKIGRSTTRMMGILSHYKLKMMLMYKMERTGGELISCTEEYTSKTCTNCGRINHKLGGSKVFKCSHCKLEIDRDINGARNIYLKNSHLL

SEQ ID NO: 649 - protein, 593 aa, synthetic construct
  REGION 1..593: note = Synthetic
MPCCESTPIPLDNGAFISQSWSDTSEILKKNSDVSKKKQRKTKRKSSTVESQVQSKRKISNDKSQHSRQNIQTISYTKTSDKDSTTTDRVFRPFWTESSSNLSKRLSYPTEIDYVGTDLNSSNSSVNNTGRKSWSRTMYKENHTIKENLPKISLPFVTSSLQEKTQQEVIRARKIKLNPNKWWKKTLINWMGTSRWVYNQCLDKINNKKCKISKKELRNMIVGAHNHGEVKKRTGKPKKKRGKKRGNWNRVVNITPPPSKTSWVLETPYDVRDSAMCSLVKAFDDNFKIKKKNPKHMFEIGFRSKKGVQTIVISGKYVYPGCILFPKYTNRIPLGCYEDFSLYGGELKIQLDTCGDFWAIVQESRPKQVKEINHEDLKVCALDPGIRTFQTIVDNIGNVSEIAPGDIGKIYRYCHHMDKLQSKAFDKRIKSKRRYRLRMAWHRMIRRLNNLVEDLHHKTCKFICDRYDVVFIPIFNTKDMVKRSHRRINSKTARAMMTWSHYKFRQMLIAKAEETGTFIKEVTEEYTSKTCTMCGNIHRSLGSSKEYKCKNCNVKLDRDENGGRNILIKSLLENEVILRYSARMEIDALGPNP

SEQ ID NO: 650 - protein, 924 aa, synthetic construct
  REGION 1..924: note = Synthetic
MPPKEKSNHLSIGNLVPAHKFAPALHGGKQLDAFIEELQRPRSDWRVLPAPLEEDDQAPLAAPAFTCVVGMPTAVGVLKIASGAGGASDCTLFVRLKRSVLDAWCRVHGKDNWSRRAFSRKLDAKQATILLGAMQPHCLKEGQVHHPQALSVLCLMSLGGWLTLPNGTTRPPTECGSFTLVGLPPADPNFEQCLTLLGHRSTFKAQAAASVADSDDENTPIAHRVDPNVWGKTHGTTLCPQWVPKFQEAARVFSNQARTVHSNCTFPCTSVHFCSPRTPTTQLRQNDARDGAINGPTSRLVRHPKPVQTVADVTTRWVGVDALLPDMAQPVANPPRRFYHADLKWVYDACPVQVRSTMPVAARKPHHFVHTDCVKRDDTRSGFTQRDLRPRSDGPDPVFVEVVAREFRDRVVAEWAPPPPAGDNADGPAAAKKRRTRARVGAYRAYRVRMIPTTEQKRQLKQCFAASRHAYNHFVDRVKNHGDAPNEYARTKDYRASARPGWVTEVANQITAGGIADAANAYRSNFAKRRLRPGEHGAFDVRFRSHRKTRTESIHIEGDGDYAGKHSSLLAFRPLPFANNPALRSECAVFFGNNLSGLGEKYWDEESVEERAERLARGREEGRKIQARKPQWRARKGADGIRLQDKPHVIARLLAEGRVGDGMGVVNGCKIHWDKRRDTFHLIYTYELPPLADPDPSFETKRIAATDPGVREFMTWYAPFTGNHGELFKDGQGQIVERCTRIDRLTSQVALRGQNYATAAPHRTRWQRRQRFRQMKRTRARERCRLHDYVAAGHYASANYLLRHHDLVVAPKLATSRMVPRDGRVFGSRTARAMLTWSHGLFTQRLHAAAYRHAGRHVISDSGEPGTSKTCGDCGHWNAQLGGDKTHNCSRCGTVISRDLNGARNNFFAAFGDAVGMGWDGVHR

SEQ ID NO: 651 - protein, 593 aa, synthetic construct
  REGION 1..593: note = Synthetic
MVQSQGQSFRFYNASLKWMYDCCPLQVRSAVPLDARKAHHFDRAFTRNCDDASSGFLQRDRRPYYPPPDDHDLRFVSQPFRRPLPEWRPSDRGVDGAPAAKSARKRERVGAYRQYRVRMLPTPEQKRELKRCFAATRHAYNWFVDRVENHGEAPKEFARKKDFRAGDRPGWVTKVASQIVMGGMADAANAYKSNFSKRRLNPGQPGTFKVGYRSHRKTLTESIHIEGDGDYQMKHSSLLAFKPLPFANNPALRSECAVFFGNNLSGLGERYWDEETSEERADRLARGREEGRATRARNPQWRTLKGADGIRLQDKPRVIARLLAEGRNGDGNGVVAGCKIHWDKRKDSFHLLYTYELPPLADPDPEFDAKRLVATDPGVREFMTWYDPATGNHGELFKGGEDQIQRRCARIDALTSQMVLRARNYKTATPSRSRRQRRQRFRQMRRTLARERCRLHDYVGAGHYAAANHLLRHHDVVIAPKLAASRMVPRDGRVFGSKVARAMLTWSHGLFTDRLHSAAYRHAGRHVLSDTGEPGTSKTCGDCGHWNARLGADKTYTCTVCGTIVSRDLNGARNNYFAALGAAKGIGWDGVHR

SEQ ID NO: 652 - protein, 722 aa, synthetic construct
  REGION 1..722: note = Synthetic
MPPPTGKFVKPAAAEKHFGVDRRTLKKWVERGHLRSVRPGDVGPWLFDISGTAPVTVGVGAGAEPEAHPSPSVNDEPVDVIYARVSTRKQLGNLTRQIASLQAKHPGCRVFKDCASGLNFKRKGLQALLQLAAQGRVRNVHVAYRDRLCRFAYDLVRTPTRTPTPAPTLDSALALARSSSYSGSTTQRSSWTQTTRTPPSRTSPTTSSLSSPFSALASTGGGAAAAVANKRPKKAATPTAPTPMPPAEEDRKRKTPLPFQRKVAVEGHLRCFKVRMLPTPEQTRELKRAFSASRRAYNWALDRVKNHGERPNNIALRNAYRKEPPPPWAAGKQAVASRIVAGGVKQLADAYASNHAKQKKDPSHAFEIKFRSTRRCPSEALKIDKADAKGGQSPLNRFAPMAHPYPKRFAEQRRCGRTECLAFLGNNFGGVGGIVLQDKPRVIERMLAEGNRLKEDAKILWDRRTGHFQFVYTFEQPRLADPDPTFAAKRVVAMDPGVRVFQTWYSPTSGAYGELNAGFQQQIEPRIHALDALHSRVERRYDTVFEGKRVVRKTLKAPPRNRTARQHYTTTRRLARKLARDRRRHVGWVESAHYDAANFVLKDHDVIIQPWLHSARLTQKSERVIRSKVARNMLTMSHYKYRQRLQWASTRYAGRHVLVTEEPGTSKTCTLCGHWHAGLGSSETFECPKCDLRIGRDLNGAIGNFYAAYGEAVGVGWDRRSG

SEQ ID NO: 653 - protein, 640 aa, synthetic construct
  REGION 1..640: note = Synthetic
MDDSHPCLIDMLNQQQSNNIMESTAEPLINGQEMEQLNTCDQHQTDNGYMGSSMETQVMDMFPSSMDESLPESNSITSDDSSMSSNRSTQDALPSPIVLPDLTTTAPVLNRFYDSRLKDVYNMFIYPTETDSVGSATISSSTYSTTMEQQLKLTNKMNSLPQTNRPSLQTTSFLSSQFSVLGCTEREVEAAVDAQVGEKRKKIPFQRQTELQGNLRTYKIKMFPTPEQKDELKRTFGMARYAYNWAIAQMKEGKKPNNIQLRNEFRKLPLPQWASEKKKQVATRITAGAIKQAVDAVLTNLKKKKKDPSHHFEMTFRSKFANSEVVNIEKAANGGSLAKMQAYTSEHLPYRAGRKNALLYFGNNLKQAGPILIEDNPNVIDMFVAEGKPKEDGKILYDRRRNTYYYIYLYEQPALRDPDPGFSDKDIVCTDPGEVVFQTFYSPSGSHGELLLDFRQVLLERCKKLDILHSRVTKKEKMRRQGLLQGRKNYLIIRRLKQAWARERARLSAFVERAHYFAANYILKNYDIIIQPQMAVSKMVSDLNSKVARSMLTMSHYMYNRRLEWASTRYAGRYIVHANEPGTSKTCTNCGYWHADLGTSRTFKCPSCGIAVSRDLAGARNNCLHAVGTVIRNRQLSEKR

SEQ ID NO: 654 - protein, 712 aa, synthetic construct
  REGION 1..712: note = Synthetic
MSSPASLRSNLGWIGARSKSGPKPVPSAPCSPEASDASDSTTSAVSVIGTPQLSPHPRRRWGQLPSQRVAPATSTPSTPSTRASPPASSSTTSERSSATCSVATPTRTSSPTSAVGSTLSARASYRYWNWRLKVAYDLCTLPTKTGSAGLHSISSSTFSAGTVRKSSWTHTTVTPPPPPPSSSSPRTSLPSSPFLALASTASAALATGASASATPPPPPQPAAPPRKRARKTAKGQAPPTEPPTEPAPTEPKRKATPGQRQRALDGQLRTFRVRMVLTATQRRTLKDCFAGARWAYNEVVGAVRQGARPNFIDLRNALVKVQGDGDNGRPPCARGVHNKILARAVKQACDAHASNFAKMRKQGLSYKFSVRFRSLAKSSTEVLVLERGKEGPVKGFEAMAAPASAKRRDAARTECLLHLGGKSFKDMGGVRLQDHDEVIARMVSEGKVLQEDAKIKWDKRTDSFYFVYTYVLPVAADPDPEFKAKRVLSGDLGVAPFLEWYQPDGSHGACLDGINAELEARCAKLDALHSRVQRRKTAHHARRTEAHKARPRAKRRATARRLHQKLARERVRLHNWVEGAHYDAANFLLERADVLVIPKIASKRMSERATRGIRSRTVRTMLTLSPGEFCARLASKAAAYAGRHVFTHTGEPGTSKTTSCCGWWNWNLKVQDKVCACPRCDVTIDRQVNGARGNLLAALGMALGIGWDGASG

SEQ ID NO: 655 - protein, 410 aa, synthetic construct
  REGION 1..410: note = Synthetic
VRQGARPNFIDLRNALVKVQGDGDNGRPPCARGVHNKILARAVKQACDAHASNFAKMRKQGLSYKFSVRFRSLAKSSTEVLVLERGKEGPVKGFEAMAAPASAKRRDAARTECLLHLGGKSFKDMGGVRLQDHDEVIARMVSEGKVLQEDAKIKWDKRTDSFYFVYTYVLPVAADPDPEFKAKRVLSGDLGVAPFLEWYQPDGSHGACLDGINAELEARCAKLDALHSRVQRRKTAHHARRTEAHKARPRAKRRATARRLHQKLARERVRLHNWVEGAHYDAANFLLERADVLVIPKIASKRMSERATRGIRSRTVRTMLTLSPGEFCARLASKAAAYAGRHVFTHTGEPGTSKTTSCCGWWNWNLKVQDKVCACPRCDVTIDRQVNGARGNLLAALGMALGIGWDGASG

SEQ ID NO: 656 - protein, 479 aa, synthetic construct
  REGION 1..479: note = Synthetic
VKKKKTVQGPACFETKNPLEENQEFRTLSVKMYPTTAQAGELRRCFAAARWSYNAVVSAVKKDGVAPNSAPLWSKIMASAPAGLKEVYAKIRKRAIKQAAEAYATNERKRAKNPQHRYKIGFRSYKRTRTEVIILEKAYPFIKAKPRKPKPPKPGAKPRKNKPRKPSSEFNPNMGPVLKIRLSPSPLWGNGKKCAGDVFFGGTLAASGPVRIADKTGVIEQLAADGYLKEDAQILWDKSVGSFHMLVRMRRTKLVDSDPDGRRKTVVSLDPGCRSFNVYYDRTGRHGELLCGAEEGINARCKRIDGLCSKHFKLAKAKHLTRQVRRRRKRRVRKTLARERKSMRNWMRNAHYDASNFLLSRYDVVLAPTFAVKDMARRNTRVFGSKTARAMYNWSHYAFRQRLKSKAFSYAGRSVIEIGEPGTSKTCGCCGSWKADLGGNHIYECLKCNITIDRDVNGARNNMLAAYGRAIGEPWDGTE

SEQ ID NO: 657 - protein, 598 aa, synthetic construct
  REGION 1..598: note = Synthetic
MAKPIRYWNPALQHLYDRVGGAGVNGAIHIPLPPKVLSDGRSKVVTKKQITAVRAPLRADVFAPLLTPGFASPLAPPRPAYAVLPCAKRKRNAIAKSKTLLAPDEHIRALKIRLLPTPEQKELLHKMFAAARAYYNETVEILNTVSDGWDEEKYLDSLMRDEDDILGDGEQDAFYWYQFFRTEEICSAPTAASYPRFTNDATMDYGGGELQDESGLRSVVHELLRKKSPWVDDVPEKIRQNAVKAAVEARDTNVAKCMAKPGTHHFRLRFRSLRNLSHTPTESIVIDSTGAGGCIRRILALDTGRRTGASSNSRADCAVHIAPTLFGANNPIRARDKRGVVDWLVSEGVIKKTAEIVWDKRINKFFLIAKRVVTRAADDRPPEERKPLALDPGSRTFQTACDADGNWTMFAVDAKAHMKRLCTKADGTQARLDALPRGGEGRWCWARRRTLRGRLRRLRRKAHNWMKHLHYEVIREMFTLGDLFLVPIFESGKMSEWGGRSYNSTVAREMYTWAHGYFRQRLWSKVQITPCKAMAFVYEPGTTRTCDACGHVMPKSTSEKFMCSACGHAAHRDAHGARGNLLSALGAAVGVAWDGVRR

SEQ ID NO: 658 - protein, 563 aa, synthetic construct
  REGION 1..563: note = Synthetic
LRRGALRLLEESFGEDASVIVDMAAPAAPFGRHLSRYYNQSLQPQYNRALLTPAAGSYTVRKIITPCAYRGLTHTLIKTPFAPLATRLKADAFQPLTVASSSVLVPPRPCYAPFPTNVKKRKMNAMVQKKTALSDGEHYRAYKVRLHPTPEQAEVLRTWMASKRLFYNQTVAEINNFRYADVSRDQWPYTVVRPWVRDIVTNDHPWTEEINQQITANSTAAAWEAFETNLAKQRVNPNHRFRMQFQSLRCLDITPTEVINCGVPGPRSQGLFKGFLPAASLRKVGGTRADFECRFGGGMPGTIRATDSSVVVIELLAMKNTPFSPLILWEKRTHRWYLILRRVVTRSPDTRPAADREVLALDPGARKFAAFYRPDGTHGELLRGADSYIQKQCRKADLERSRTDTAANHDQWHRHRGRMLRTFARIRNWTRNAHYEAIKSIFTLADFIVAPIFESQRMVRRAERVFGNDTARRLYTWSHYGFSQRLYSKVQTTTNKQMAFTREPGTSKTCDRCGAWNAALGGSETFTCRACAYEADRDHHASRGNLLAALGAAMNVGPDGVER

SEQ ID NO: 659 - protein, 626 aa, synthetic construct
  REGION 1..626: note = Synthetic
MSQVPKFPSNSESASPPSATGKRKAKFKPLEHVADIGSTTSRTSYKKPKTTRNRTTRGTTSSTVGFPPPNSPTTSNDKFSICVHNFQGTKSSQTSDQALTSKEKGCEPFWAKHKEAEYAKLLWPTETDYVDSPLTSLSGSSPKGARHSWFKTESKTFNTSSQRTSWPSYTCSVVDSTACDGTSALSKPTPTKKKKTKKEEDNEDNEEQKGETLQRKIRLFPTAAQATQLKRWMEASRWSYNQAVFAINQRHTANQRRKTQDKKVRRQWSAISLRNVVSRTRKHLRLFEDVPVHIMSYAVMDAVGALKSNMAKWKKNPKHYFELNYKRTNDKMAAITIEKTAAKILESALLFYPSYMEKLPIRCSKIPPLIPRGKPQCDNRLSVDAMGHFYFHIAIQETPSELHASSTPRQSVVALDPGVRKFLTAYSPDGWIAHLGTKHDTGRLAFLKRRVQTLVARTKALPRKQRQKKYRMKKAAQRARNRIKHLVLDMHCKITNYLVKSFSVIVLPDFRSQQMSKKKRPNGKKRQIGRGTVQLMQTLSHYSFRTRLLQKAARTPECSVLICSEAYTSKTCGLCGNINSKLGSSERFRCTCGASLDRDVNAARNILLRNLHSVEAAQEVCQLGHV

SEQ ID NO: 660 - protein, 324 aa, synthetic construct
  REGION 1..324: note = Synthetic
MSYAVMDAVGALKSNMAKWKKNPKHHFELHYKRTNDKMAAITIEKTAAKILESALLFYPSYMEKLPIRCSKIPPLIPRGKPQCDNRLSVDAMGHFYFHIAIQETPSELHASSTPRQSVVALDPGVRKFLTAYSPDGWIAHLGTKHDTGRLAFLKRRVQTLVARTKALPRKQRQKKYRMKKAAQRARNRIKHFVLDMHCKITNYLVKSFSVIVLPDFRSQQMSKKKRPNGKKRQIGRGTVRLMQTLSHYSFRTRLLQKAARTPECSVLICSEAYTSKTCGLCGNVNSKLGSSERFRCTCGASLDRDVNAARNILLRNLHSMEAAQ

SEQ ID NO: 661 - protein, 399 aa, synthetic construct
  REGION 1..399: note = Synthetic
MAYESIKTKSLRIYPTKEQKIILKQWFGVSRKIYNETINKLNKHDGQKSWMSEKTFQNHNSETWQQDWCKKVPFQIRGNSIKEAYTNFYSNCKKSKKKGKPFEMKFKSRKNLKQTVTIPAESLKKDGVYPRILGFLDIKERNKYYDIIKNNPCDSKLTYDHGNYYIIVNYKVLINPNNNHIENQDVVAIDPGVRNFATIYSLEGVCGYIGRKSFQKIYKLSLLQDKIISLKSKINKISYRRKLNRIYQRRKSLIDELHWKTIQFLIQNFDYIIFPHYETQDLVQKMVSDKKKKKFMSQSVRSMLSFNNYLFKQRLKQKCKEYGNVYIEVSEAYTSKTHPVTGELMNIGNKETFKYNKLIMSRDINGARNIMLRTLRDASVTIGSDCYDLPTIKVVGANI

SEQ ID NO: 662 - protein, 522 aa, synthetic construct
  REGION 1..522: note = Synthetic
MDIIFKENLQAVKQLKQSDKLIQCRGSTIISASKESMKRREKNPIVIAGSQVENKKVTISDNTQCDNNSKTSEMYLTSNEKYYKPFWDDSCELISSNLLSHIQIDSAYLETGLSKQENKSWFSKENKFHQIKDSQKNFLQSYKTSFVECKSLEDTQIKSRKIRIYPTQHQKILFKRWFGVSRKFYNETLVIYKNGSQKTWDKVYQEIAEKNKDYDYIKSVPYQIKKVAVKDYNNALSINKRKAKILGKPFEMKFRSKKTPKQSCFIPKTAISSSGIYHRIAGKLKMKEREWFENENICDCRLTLEFGKWFIVIPKEVKTTPIENQEGIVAIDPGIRTFVTYFSTEGYFGKLGKGAFERILRLNMKIDKLISKMSKETNKHKKSNLKRSIFKIRFKIRNLIDELHWKTIKFLTSRFKVIIFPPFNVSKMIKKSKRKLSKKVVRSMSCFRFFEFKERLKLKCKENGVTFIESSEAFTSRTNSFTGELIKNLGSKEKFEFDNILVDRDINGARNILIRAMRDASA

SEQ ID NO: 663 - protein, 493 aa, synthetic construct
  REGION 1..493: note = Synthetic
VVLITTGKELKPFWNSYCEEIGSRLWLPTETNSQGLEQNCLSSYLRVTEENSWFSVMKRNLQNKNSQKVYSQFSMYSHTGVMEVINTKKIRIKPNKKQQQFLKEWIGSARNAYNYVISKSNDHRSLNEETLLSLQASGLTYDQAKEVIKTSTFPTWMELKKKDNFEFWETREEWLKPIPSKCFTEAFKHACDARKAGFKKGSKFSLKFRSRKDKIQSCFIPKSAIRSDGIFKLNMKRFCGIGEIIFTEDLPKNHLDSELVLDHGEWFLCVPYKKKLKPIESQNRVVALDVGIRKFLTFYSEDSCGFIGKNVTDRLFRLSKVLDGVVSKISRSSGKLKRVLKCKADKLRIKMKNLVKELHYKVCNFLVKNFDLVLLPHYEIKNFVIACGRKLNSKSVRNMLSLNFYKFSQTLIRKFNEKKGFLNINGTLYSRVVRVNEAFTSKTQTWNGEIVNIGSKETLKISENATIDRDINGARNIFLRALVDSPILRDLTS

SEQ ID NO: 664 - protein, 529 aa, synthetic construct
  REGION 1..529: note = Synthetic
MPDTFPAREPLPDNGYSESMRGSALKQPLPATPGSVVTNRKTTFSGRSNGSQHGIRTPRSSATSDPASISTERVLGPYWNDACLENSSRLWLPTKTASAASGSNSSVGSSNGMGGRSWFSVSRQSAPHLTNSLRIYSRSSGSFPPECTGSVNTVVKSRRITLYPTPDQKAVFQAWFRASRFVYNRAVEYLKQLDGPRPHWTVVKKTILHNLPDWCRDLPYQVKSIAVRDACRALSAGKLKVKQGIIPRFNLSFRSRKAPKQSCFIPATAIKPGGIYPKLSGQLRYGEELPQQHRDSRLVWEHGDYYLVVTFSAPRQQHTREPSVGVVALDPGVRSFLTFYSPVDCGKLGDQAQQRVCRLLSHLDRLVSRMARAAGQRKRRFRLAQARLRKKIRSLIDELHWKTIRLLTTNYQTILLPKLDTKRLSGRLHRKLRNKSVRAMLGLAHGLFRVRLAHKCQELGNELRYVREDYTSKTCSWSGEIVNIGSKQEIVGSDGIRLDRDVNGARGILLRALVDTPSSFVLEHAAAGM

SEQ ID NO: 665 - protein, 349 aa, synthetic construct
  REGION 1..349: note = Synthetic
LKTKGNWMYFAKELFHSLQTDPKFSYLSDIPYQIKKLAVEEAFKAFSTNIKKIKQTGKLFNLKFRSRKDPVQSFAAVSSAIKDKGLYVRMLGDMKLAEPLPNKPKDSRLVKENNQYFLKVPYEKEVTFSESQGKCIALDQGLRTFLTGFSETEVFKIGNQCLSKIARLCISMDKLISKMKKEKLHLKKQRMKKALMKIKAKRMNLIDELHFKSINYIVSNYDIILLPNFNVSDMVSKTKRKLNSKTVRNMLNLNFYQFSQRLIAKAEVLGKQVIRMSEAYTSKTVSWTGGVNDKLGSSKVVKSGTVRMDRDINGARGIFLKALVDSPSFLNERALSSNLAADLADLDQV

SEQ ID NO: 666 - protein, 324 aa, synthetic construct
  REGION 1..324: note = Synthetic
MNAGKVLTNNCPEWAEDVPYQVKKLAVSEFHTALITNKKLVVKKKRTSFEMKFKSRRAPTQCFDVVASAISTKGIYPTKLGKPHYTEDFPEGEVRDSKFILENGRYYLCLVYKTTITRVENQARRVVALDPGVRTFMTGFAEGEAFKIGEQAFARIARLCYYLDRLMSKMSKVTAAKRYRMRKAANRIRWKLNDLTDELHWKTIRFLIDNYDLILSPSFETSQMSSRLKRRLSKKSVRNMLSLKHFQFKMRLKNKCQTEGVAFMEVCEAYTSKTASWTGEIKHNLGSAKTIISNGLTLDRDINGARGIFLRALVDTPSLKYQCA

SEQ ID NO: 667 - protein, 528 aa, synthetic construct
  REGION 1..528: note = Synthetic
MLIKDSSQQSETPPGSDCLTLTPICAALLGLAPSSTPALVAPSNATISPEKLSGCGASTPTRTSSRTSAAASTSSAKVCVPYWNDSCAETSSGLWLPTVTDSPVSASTSSPFSSNTTAEKSWFSINQWINPEKPNSPPIYSPSSISSRVECTVGDVIKAKRIRLYPTPEQKTLFRQWLGTSRFVYNETVKHLGLPKEERERHWMGAAKQILASLPDWAGPIPYQIKKIAVEDAYKAFSNGIRRWNQTGEPFDLRFRSRKNPKQSCFIPSSALKDAGVYPRIAGSLKRAEDFPDNPRDSRLVFEQGRWFVIVPYRVPIIPTENQGRVVALDPGIRTFLTGFAEDQAFKLGDGDFARIARLCHHLDRLLSRIAKAKYRQKARLKKAANRLRWTIRDLVDELHFQAIRFLLDRFDLILLPTFETKEMSAKSKRKIRAKSVRSLLGYAFFRFGQRLEAAAKRLGKVVIRVNEAYTSKTASWTGEIKQIGGAKTITSAGVTVDRDINGARGIFLRVLVDTPSLRNECACVGAC

SEQ ID NO: 668 - protein, 544 aa, synthetic construct
  REGION 1..544: note = Synthetic
MLERLTTFEQRADSVDTMLTPICADMEQVQLSAIAGSQAESSETISQDKSPSCGKSSRKRRSSKTLALASTSRGADCVPYWSDQCAEISSGLWLPTETVYAASDSILFASSSSGQEAKSWFSTTRKQAPTKSLLTISYQSSTSSLAASTGVEITRTRRNRLRPTPGQRQLFKSWIGCGRFVFNRTVEHLKQPGTKANWKAIKGPILASLPDWAKATPYQIKSLAVEDACKAVTAAKKKYRETGLISEVHFKTRRDPRQSINIPGSAILPNGIYPTISGKGLHYVEPLPNKRVGKGSKNGNATMADGRLLFEYERWYLCVPETVTVHQPENQGLRIVAIDPGIRAFATFYSADECGQIASGDYGRLIRLAQHLDDLLSRLDKKRKDGRVTARRRQGMRKAANRMRAKFKDLVDELHWKTIRFLVDNFDVILLPTFETSQMVQRGARKIRAKSVRSMLTFAHYRFSQRLEWKAASLGKTVIRGSEAYTSKTASWTGEIIQIGGRKTIKSGGVTVNRDINGARGIFIRMVTWALGDHPTFFKWSVQC

SEQ ID NO: 669 - protein, 300 aa, synthetic construct
  REGION 1..300: note = Synthetic
MDACRAVKAAKVKTKQTGNPHKVRFRSKREPTQTLFIRNDMIRKGTVYPTKLGVLSFSESLPEHPRDSRITWENGRWFMCVPHEITLSPGARTKPYYAVGVDPGVRTFLSFYTDGAVGDLGEGDFGRIARLCAYLDDLMSRLDPKRKENRVNAAKRQRMRKAANRLRWKIKDLIREVHWKCARFLCENFEVVFIPDFETQQMASRTKRKLRKKSVRAMLTWSHYQFRQRLEWMAKKLGTTVISVNESYTSKTVNWTGEVNHKLGGARIVKGSDGNSMKRDHNGALGIYLKGFVGYGLTKC

SEQ ID NO: 670 - protein, 249 aa, synthetic construct
  REGION 1..249: note = Synthetic
LGQSKLKEALPKVFSDGRLTLACGEYYLIVSEKVQQAHTDNQGRLVALDPGVRTFMTFFSEDSYGWLGVDSNLFIQKLCFRLDKLVSKISRAPGRQKRRFLKAASRLRCKIKNLVKELHHKIAKFLVDNFDVILLPTFETSQMVSKSRRKLKNKTVRQMLTLSHYDFKTFLKWKAWESSKLVIDCNEAYTSKTVSWTGEIVQNLGGAKTIKSQATGLKMDRDLNGARGIFLRALVDTPLLRDSLDLSVC

SEQ ID NO: 671 - protein, 307 aa, synthetic construct
  REGION 1..307: note = Synthetic
LHPNTLRKYADNGKIESIKNEAGQRLFHVESYLRGATRTSFVCYCRVSSTKQRDELGRLAYMQSLVTFKEALPQSFGDCRLVFAYRDYYLTVPEEVPLQKSDNQGRVVALDPGIRTFITFFSECSFGEIGTSANLQIQKLCFRLDKLISKFTKAKCKQRRRMKLAASRLRGKIKNLVDELHKKTARFLVDNFDIILLPTFETSQMSRKAKRRVRSKSVRQMLTLSHYRFKQFLKHKAFETNKVVMDVNEAYTSQTVSWTGEIIPNLGGAKFVKSPSDGLVMSRDINGARGIFLRALVDTPSLKECIC

SEQ ID NO: 672 - protein, 379 aa, synthetic construct
  REGION 1..379: note = Synthetic
MDSVATARKSRRIRIYPTTEQRAVLRLWDEAGRWCYNKAVELLREGFQGNRYELRAAVLAELPERLEAAPYQVKGSAVFDARKAQNNVKAHNRKVFQTGEGQSAKLHFRSRKHPRSSIFVPRTAITPTGIYKKLLGDMKHGELLPEPWYDSRLVREGDRYWLVVATDAHRTEAETQGRVIALDPGVRSFQTGFSETEAVKFGEQDFGRIARLCHHLDDLMGRIAKAPARKKSRMKNAATRLRRRIKDLVRELHHKVARWLVDHYDIILLPTFETSEMVEKAKRKLNSKVARAMLTWSHYQFAQFLTWKTWESGKVVLRVNEAHTTKTCSWSGEVVANMAGRKTIRGSDGIVLDRDINSARGILLRALEDTPWLREQLVS

SEQ ID NO: 673 - protein, 562 aa, synthetic construct
  REGION 1..562: note = Synthetic
MPKKTKSNTSKTKQDNDFTMSNPMQGELAQGELFSIAGYPAQSKDQTLSAKQNISLIDSQEQKSSKILAQDSTTKEKDLKPYWNDVCEAISSKLWLPTEIDFAGSDLSSSNLLLNKPVEKSWFSTIKIATQKQSSQKTCYPSSTLHVAGCTENAVIAKSKKIRIYPTLEQRALLKHWFGTSRYVFNKTVEYLKQPGTKARWMKVAPIIKSELPEWADPVPCQIKQIAVRDACFAVRDAKKKTIKGEHSFVKFRSRRDRVQSVFIPSTAIKPKGVYHTILGELRLSQELPEKIRDSRLILHRGQYFLCVSTETSVVATENQSGNICALDPGVRTFLSFYSPRCAGKIGDKDFGRIHRLCFYLDQLVSRISKAKARQKRRLKKAADRLRTKIYNLINEIHHQAANWLTKNFGIILLPTFETSQMASRSNSRKGAKAQRDAIKLNSGKSTAGFTIRVHPRSSAVRKLRSKTVRAMLTWAHYRFQEFLLDKAKERNKQVLLVNEAYTSKTVNWTGEVDGNLGGKKKIKSKLTNTWMDRDINGALGILLRALVDTPSLESIRSAFVN

SEQ ID NO: 674 - protein, 544 aa, synthetic construct
  REGION 1..544: note = Synthetic
MQTMGHSDAKGHQEGLDSLTQQIFSVLEKLQSLTNCAVTPSVIAESVVQNSETILPAKSLTSTLSSRKQTSSLTSVPVSITTGKGLEPYWNESCLEISSRLLLPVETDLPVSGLNSLSTWSVSTVEKSWFSTNLKVVFDQNLPQILSPSFTSYPAGFTDSESTVKKSKKIHLFLNPEQRAIIRKWFGVSRYVFNKTIKILQDGETKANWKAIKTGILNDLPEWCKEVPYQIKSIAIKDACTAVREAKKKYKKTFQIQRVRFRSRKNPIQSCYIPKSAVSTLGIYHTKLGEIGYTESLPDQVCDSRLTSNNGNYYLVVPYKETKKKTENQGRVVALDPGVRTFITFFSETSVGKIGNGDFSRIQRLCQHLDNLLSKISKSSGGQKRRMRKAARRMIVKVQNLINELHHKTARFLVDNFDVILLPTFETSQMSKRKNRKIRSKTVRNMLSFAHYRFQEFLKHKAIEAGKIVVDVCEAYTSKTVSWTGELVNIGGGRIIRSKVDGRSMDRDINGARGIFLRALVDTPWLRNQLALVSQNFPLRDSGS

SEQ ID NO: 675 - protein, 420 aa, synthetic construct
  REGION 1..420: note = Synthetic
VEQSWFSTSLLAVQNPNSQRTFCPSFMSSLVESTASENTVTKSKKILIYLTASQKEMVRQWFGVARYIFNKTVELLKDGEIKANWFAVRPLIMDALPDWCKEVPYQIKNKAVRDACIAVSSAKKKYKKTGEIQRVKFKSRKKPIQSCFIPKSAIKARGIYYTKLRELAYSQELPENLCDSRLISNNGKYYLCVAYKVAAFPAENQGRVVALDPGVRTFITFFSENSVGKIGHGDFSRIQRLCHHLDNLQSKISKAITGQKRRRRKAARRMIIKIQNLINELHHKTARFLVDNFDVILLPTFETSQMSKKRDRKIRSKTVRNMWSLSVAEVLTFAHYRFKEFLRFKAQETGKMVVDVCEAYTSKTVSWTGELVNIGGSKKIKSKVDGQVMDRDINGARGIFLRALVDTPWLRNQLALVSQV

SEQ ID NO: 676 - protein, 516 aa, synthetic construct
  REGION 1..516: note = Synthetic
MKARSNTLEHYQSNEDMTLMAISEHKEQPRPSVIAESQAINKKTICKDKLTICINDFLNAKLSKTLDLESILKEKVYYPFFNEQTKELSSRLYLPTKTDCAGSDSILLNGLLKTAVDKSWFSTKLISHQKQNSPKTSLQFYMSSPAECMALEVIKTKLLRISPTKEQKKLFKTWTDCSRYVFNQTIDYIKTCIGFNPSWMGIKKDMLKQLPAWCKPVPFQIKGIAIKEACNAFWKAKGKPAFRTRKNPEQSCFIPKSALSLKGIYSKISGKGLYFQETLPDNFKDSRLIWRHEKWWMAVPHKEKLIVGENQATKIVSLDPGIRSFITFYSPDHSGHLGKGDFSRIQRLCSHLDNLVSKRDLIKNKQRRRSLTKASRRMRAKIKNLITELHHKTAKFLTDNFDIILLPTFETKDMSNKTGRKICRKSVRSMLTFSHYKFKQFLKWKAFQTGKLIVDCCEAYTSKTHPQTGEIRNIGGAKWIKLSDGSRADRDIIGARGIMLRALSDSTMRNHTVNES

SEQ ID NO: 677 - protein, 317 aa, synthetic construct
  REGION 1..317: note = Synthetic
MGIKKDMLKQLPAWCKPVPFQIKGIAIKEACNAFWKAKGKPAFRTRKNPEQSCFIPKSALSLKGIYSKISGKGLYFQETLPDNFKDSRLIWRHEKWWMAVPHKEKLIVGENQATKIVSLDPGIRSFITFYSPDHSGHLGKGDFSRIQRLCSHLDNLVSKRDLIKNKQRRRSLTKASRRMRAKIKNLITELHHKTAKFLTDNFDIILLPTFETKDMSNKTGRKICRKSVRSMLTFSHYKFKQFLKWKAFQTGKLIVDCCEAYTSKTHPQTGEIRNIGGAKWIKLSDGSRADRDIIGARGIMLRALSDSTMRNHTVNES

SEQ ID NO: 678 - protein, 528 aa, synthetic construct
  REGION 1..528: note = Synthetic
MMSIVTLENQPLLPQSATVESQAINNVATLNDKLNSCEINTLPHNSSETSEADSIPTFVGTCFKEEVLKPFWNEQCQELTSHLWLPTETGLQDLGLTSFDKLSSKMVENSWFSTRLYSRQNKNLQQTCSISSTYFPQECTDLEVIKSKSIKLSPTPEQNRLFKHWQDVSRWVFNQALNFMIVYETSEELGVKKPSWMDIKKMFTKTLPEWTKDVPFLIKGIAVKEAVEAFWATLKAHKGKKGKISFHFRSWKDTTQSCYVPKTAISDKGIYPRVSGKDLKLLEFLPEEVMDSRLVWRAGRYFLTIPTKQRVSYGENQAHVVAIDPGVRTFSTFYGTDSCGFLGQGDFSRIQRLAFHLDDLISRMSKVANKQKLRKMKLAAARMREKVSNLIDELHHKVALFLVTNFDCILLPTFETQQMVSRGNRKIQCKTVRSMLTFAHYRFKTFLKHKAFEFGKEVVDVCEAFTSKTHPETGEVKKVGSAKRIKLLNGQWINRDIVGARNILLRALVDQPHKVTWQLANVNKINVC

SEQ ID NO: 679 - protein, 348 aa, synthetic construct
  REGION 1..348: note = Synthetic
MTISAMEESYKSLGNSGSYMKCRKEWTEQFKKEVPWWDEIPAHTLYGAMRDAEKDYRLVIKKRAKGEKHNLPRCRAKTQRSFFILGNGITERGVYVRRLGKMKSSEALPNKPMDSRIIFEAGKWWLRTPEKVQAQVGDNQARVCSIDPGVRTFATIYSPEGIGKIQSGAFGRIVRLLQHLDDLISRTVKEKCKQRKERMKLAQARMRLRVRNLINDLHFQTISWLFSKFDTIIIPESDFTSAITKATRKIRSKTVRALMGYSFARFRDRVAHKASLFGKTVVRVCESYTSKTHNITGEIVNNLGGRKTITSQGLTVDRDINGALGIFLKALLAQPAGSNLPQCERKGT

SEQ ID NO: 680 - protein, 621 aa, synthetic construct
  REGION 1..621: note = Synthetic
MEQLSLIEPNPAKDDITSRHILGWNNKRVSSAIVESQTKNSEATLIELSSLCNQDTQTLKSSKILAAGSIISVKGLNPYWDAQCEANNSKLWLPIKTDSQDERRKLRYFVSVLNLSNGLSNKTVEKSWFSSRLIYPQSKNLQTIFLASSRFSPVGCTDLDTKWRRSRPTTKNKFAKHWDTQKLSHEDDTVCSALLRQNDCRCYVFNETIKYIRSCVNFNPSIKEIKNDLLKQLPKWCDDVPFKIKEKAVKEAHRVFKSVEDEPMTRAKTIKLKPTSEQKQIFKRWNDCSRYVFNQTIDYILSCVNFSPSWMEIKKDLLKQLPSFCDETPFQIKGQAVKEAHQAYWKAKAHPKFRSRKNPTQSCYIPKSAIKKAGIYPRVSGKNLSYTEALPEEPLDGRLIYQYHEWFLSVPQKIETRVAENQGRVVALDPGVRTFQTFFSEFMAGQIGYDDFGRIQRLCFYLDDLISRTSKAKSKAKRRMKNAQARMRKKIKNLVKEIHLKTARFLVDNFDVILLPTFETSQMASKSGRKLRSKTVRAMLTWAHYQFKVRLKNKALEFGKKVIDVCEAYTSKTVSWTGELKKVGGSRVIEAGGIKMDRDLNGARGIFLRSLIDSPALMGQP

SEQ ID NO: 681 - protein, 529 aa, synthetic construct
  REGION 1..529: note = Synthetic
MRTMERFEPCDCRQDSGSTMLNRMCKPESEVSLLSVTAGYPVGSKLMISSGKRSSCGVSIPERKSCRTLEVASTSEGRDCGPYWNEYCAGISSNLWLPTETVLRDSDSSLSSSLLGETLVGSWFSTEQWTAPKQSLPGTSFRFSMSSLVESTGCESTVMKSRLIRLYPTAYQEKLMREWMGASRYCYNRAIDYRKAEQPCWDWMVVRRCFMPYLPRWTDAIPFQIKGIAFKEAFETVQRCIKVWKRTGVWAEPKFRSRKEPKQSCFIPKSAVSQDGIYPTILGKIRFAETLPDEIGDCRLVSYGGRWYLSVPHRVKRAIAESQGGRFVSLDPGVRTFITWYSAESCGKIGAHDFGRIQRLCHYLDDLLSRSAKVSASARRRMRKAADRMRWKIRDLVNELHHKAARFLCENFDVILIPTFETSEMVSRSCRKIGTKSVRMMLTFAHYRFKSFLKQKAFELGKTVIEVNEAYTSKTVSWNGEVIEKLGGRKTIKSSDGVRMDRDLNGARGILLRALADSPLLEQAFVKIH

SEQ ID NO: 682 - protein, 569 aa, synthetic construct
  REGION 1..569: note = Synthetic
MLILSDSLRMLAREASFAHREAIDVMTLKRLFKAKPKHNPNQLHCLPYATVSASVRESNVLPSKGKSPPCANSIRFPLRVSETLVQDATISEKDSEPWWTDAAAVISSNLSSPIGIDCGDSASSACNTWWNRTVANSWFSTRLFTHLPKNSRPICSTFSTSSVAACTASAAIVPKSRKIKVSPTKEQRQTLRFWLAGKRYAFNATLKVLRKHQKSPHWKSIKTKVLKSMPRRYKAVPQQIKADAVREAWQALRNAKLKAKQTGDKQEVSFQHRHLQQQSMFIPSSAIKAEGVYVTLLGDLHLTEPLPARVARRFGKPTDSPRDPEKRYAGEPKPTDEIRDSRLSYERGEWFLCIAYHAPQEPPAQLARIVALDPGVRTFLTLFSETSFGWLGHHDIGRIQRLCTHLDALIADTAKAPRRKKSSMRRAANKIRRRIRNIVKELHCKLAHFLCTNFDIILLPTFETKNMSARAGRKIRKKSVRHMLTLSHFKFQQRLLDKARQLGKQVVLVSESYTSKTCSWTGDVIAKLGGRKVITAPDGTRMDRDLNGARGILIRFLTKCVTLLDGASA

SEQ ID NO: 683 - protein, 491 aa, synthetic construct
  REGION 1..491: note = Synthetic
MKHYKIPRETSAILGISIDRLRRLAENGTISTIGTPGGQKHYDVQGYLDEQTGTDITTIGYCRVSGKGQAEDLASQVAYLQKHYPEAEIIKDFGSGINFKRKGLRTLLERLLRGDKLRVVVAHRDRLARFGGEAKDTPKNFKGLVPIVFDQLPEWHVETPRQIKAGAVIDACQAIKNAKVKCKETDKFQKVSFRSRKNPRQTLYLRADSLKKNGFYVRLLGQMKMSEPLPAKPQGTGKVSERDTNAEVKDSQLIMENGRYFLCVSYVEKKKTREPSGRIVALDPGVRDFMTFFSEDRFGWLGQQCINRIQRLCQHCDNLLSRATQEQRPLRRALRKAANRIKVKIRNLIDELHKKIAHFLVTNFDIILLPTFETKQMTKRGARKLRKKSVRQMLTLSHYRFKVFLKHKAKEYGAQVIDVCEAYTSKTVSWTGELITNLGGSRVIKSSEGHRMDRDLNGARGIFIKNVARALTVRPCTANLGASKSLIPSAT

SEQ ID NO: 684 - protein, 550 aa, synthetic construct
  REGION 1..550: note = Synthetic
MFHPEKPLKYSDSMQTHLENMPMKGESPLTELPVGSEGLMSTPILAPPLKPSQLSLAIAECLHLPKSQTLSDKPNTCVSATQVSRSSKMSAPPSTISVKGLNPYWDDACEARSSQLWLPTKTDSFVSDLNSLRGLSASAAVNSWFSVEIKENPNVNSPKIYWPSFMSSLAGATGEEITRAKRIKMRPTRSQAKLLNSWLGVYRFVYNETIWLLNLRIVHPNFMAIKKYLIPHLAEEYPWTKECPRAIRDGAVAEACQTVQQAIAKFKRTGEVSRCRYKSRKDAQQSFFLRNDQWSKDRRGFNVRALGDMKFAEALPMNLRDGRVIKFANKWYVSLPVLKEPDAAENQGRLVALDPGVRTFQTFFSDLHVGHLGQDDFQRIVRLAHHLDLDRLLSRRDKAEGKRKRLSFTKAADAIRLKIKHLIDELHWKVARFLTDNFDVILLPTFETKQMTSKAGRKLRRKSVRSLLSFAHYRFGQRLEQKCIERGKKLVRVCEAYTSKTASWSGEIINIGSAKVIRSNGIEMERDENGARGIFLRALVDSPILIEGAR

SEQ ID NO: 685 - protein, 531 aa, synthetic construct
  REGION 1..531: note = Synthetic
MQTKTKSKQSELPAGTGCSTPIHFRANRLSDQPQSAIVELVQPNKNQVSLDKLLNLEPNSPKQTSSKMWDPSSTSKEKGLGPYWTDCFKEIVSHLSWLAETGSAGLDSSCLSIWSPKTVEKSWFSTNLKQVRNQNWFKTCCQSYLSSLAESQDSTDTTMISKKIRLLPTQQQKQQLNSWINGFRFVYNQSLEYAQKQTTTPSWFKTKKQLLDQLPSWTKQIPYQIKSIAIKEAFDNLRQRKKQAKFKHTKFKMHFKSKKEPQQSCYLPKSAVLTKGIYPRLLGKLKYTESLPSNIGDSRLVYVYGKFYLTIPTTKQRSLTENQGRIVALDPGIRKFITFVSHDSAGCLATHDIGRIYRLCFYLDQLVSKTSKAKSKQKHNLRKAANRIREKIKNLIDELHNKVAYFLVNNFDLILLPTFETQQMVSKAHRKIGSKSARAMMTFSHYKFKQKLKHKAFEYGKVVVDVCEAYTSKTNNFTGVVDKKLGGKEYVLVGGKKVDRDINGALGILLMALGDTPYLDNSVHNCTANHY

SEQ ID NO: 686 - protein, 518 aa, synthetic construct
  REGION 1..518: note = Synthetic
LTPTSRKKRGKNGGKSATVESPVTSNEMTLSDKLSSCADATQITKLSQTSGQDSTLKEKVLYPYWTGLAKELSVKLLSHIEIDSLDLGLTLSNGLVKNSPVKSWFSTRINFHPQKNLQGICFRSSMFSHTECMDSESTNVKSKKIRIFPNQQQTVTLKKWMGTARYVFNQTIAYLNKPDTKASWKAIKTGIIQSLPEWSKETPYQIKSIAIKDACDAVKNAKKKFQQTKQIQLVKFRSKKERRDSIYIPKGSVKSESVYITSLGKSLQPAEVFPDIEFDCKLVHQNGKFYIIIPMVFESKKSENQRLGLVALDPGVRTFQTFFSLHLNGDFGNLDIGRIYRLCAYLDNLYSRISKAKGTPKYRMLKASRRMRERIRNIVDEAHKQVAHYLCSQFDVILLPSFETSEMVVKKSRKLRSKTARAMLNWSHYRFKEYLKFKAQEWKTQVIEVSEAYTSKTCTKCGHIHTKLGGNKKFKCPSCGHTLPRDLNGSLGIYLKALVERPELLQWREHLLAMGNQS

SEQ ID NO: 687 - protein, 515 aa, synthetic construct
  REGION 1..515: note = Synthetic
MSNEHQAENGCMMSSLLLGKQSQPSLFVTVEYLVPSNEMTLIDKWLTCANDTLTTTLSQMLPVASTSNGKDCFPYWNESVAEKSKKLWLPTKTDWLDLALTSLSGSLNITGATSWFSTILLSPLKLNWLPTSWLSSLSSPVVSTVSGNTVKRLQKIRIYPTSQQRQILRNWMGTARFVFNKTVEYLRQTGTKANWKLIKTGILNDLPKWAKDVPYQIKSIAIRDACLAVRQAKLKFKQTGQIQQVKFRSKKAQRDSIYIPKSAVQQQTVYRTLLGENLNPRELFPQIKYDCRLVYQQGEYYLCIPFDKAIKQAENQRQKLVALDPGVRTFMSFYSETLAGKLGEHDFGRIVRLCYYLDDLMSRMSQVKCRQRYQMWKAAGRIRQKIKNLVNELHYQTAVFFCKQFETILLPTFETQQMVSKLHSKTARSMLTWAHYRFKTVLKDVAEVYQSKVIDVNEAYTSKTCTVCGYVQSIGGRETWTCKSCGTDHDRDLNASRGIYLKYCVALGDTPSRQL

SEQ ID NO: 688 - protein, 538 aa, synthetic construct
  REGION 1..538: note = Synthetic
MVASARNNFPADIGAIGLLSSPVRGSAIAGLVPPNSGTILQDRLLLCAASFPHTKLCKTWVVDLTGSERDCAPYWSESVAARSARLWLPTVTDYAASASSLWSGFAHDTVANSWFSTQISVHPSRKWLKTCSPLSTSSPAVFTAGESTHRCKRIRLFPTSEQRRTLKMWCGAARWFYNQAVEKQVSNRISVQVAMLTACPGWAKSVPYKIKQMAIEDETIARKNGFKFAKKTAQAFHLSFRSKKMRRDSLYIPKQSVGPNGIYPRLLGNMKSAEPIVQSVYDCRLLHNNGKFYLLVPYDKPKRENQAQGEVAVDPGVRTFLTFFSPDVVGKIGDLAINRIQRLCAWMDKLVSRTKWRAARRMRERIQNLISDLHHKAALWLVKNFRTIVIPKFDAREMTIRKARKINSKTARKMLTLAHGRFRTILLDKAEEWGRTIVHVSEAYTSKTCSVCGKQHVIGGKKVMNCCEKYDRDINGARGIFLRALVDTPSGGNVGALKETVAACPQLSTQKGIGDASFSVTVTKTDVSAGSQFSWIAV

SEQ ID NO: 689 - protein, 546 aa, synthetic construct
  REGION 1..546: note = Synthetic
MPIVLCTYLVVRLALSWEFMQTHCGDGQMKEKFDTSGQPGVNASMTVQASNKAVVRKRTTATAASHRQSKRTTSKGKSVSCQKDTQTTPFSKMLGLVSISKENNFSSCLKNVQWEGLEKLSLPTETDFADLDLNCLNGSSLKTLSNSWFSNNKNYRLNRSLLQTSSQLSRTFQVEFTDSENTVQRSRKIRVYPTQEQKKILSNWFGASRFAYNKTVEFLKQPDTKAQWKSVKTNLLHEMPEWAKEVPYQIKSVAIRDCCQAVSNAKKKFKQTGKFQEVKFRSKKRGDNNLFIPQSAVSENGVYHTILGKLKTAEPLWKPVHDCRVVLQNGRYFVIIPIDVAVKRPENQRLSACALDCGVRTFQTVFSKELILKVGEHDFQRIFRYCYALDKLISRKKKERSNKFNKAMQRIRWRVRDLIDEIHNKLAIALCRMFEVIYIPTFETHDMVSKLKHKTSRAMLGWAHYRFKMKLKAKAEEYSCKVVDCTEQYTSKTCGNCGLENQIGGNEVWTCKHCGCMHDRDINGARNILLKQIFLAMRDSSTSCLA

SEQ ID NO: 690 - protein, 438 aa, synthetic construct
  REGION 1..438: note = Synthetic
VLKINLLPRDPGDPEVTPYWDDFCASIAGVLPVHSEAQAVESGSWFSIARSFDTEVKPDSRKPSSFKIIRSRKIRVYPTADQRQAFKALFGTTRFGYNSTVAYLKTPGTKANWMAIKKPLLDSMPEWTHSLPHQSKSQSINDACKAVKAAKKKFKLTGEFQEVRFRSKKSPNQNAYIPKTAVTDKGIYYTIFGKLLASEKIPKADHDCRLVLQNDRYYLIVPQDVDAETCENQAGFVSLDPGLRTFLVAYSECGVEEYGAASYSRIARLCYALDELIGRTVKASGASKRRMKKAQLRLRNRIQDLIAELHHKVACFLTRTYKVIAIPEFNFHPMSGKLLRKTVRGLATLAHGRFRQVLASHAEKRSCKIVFQNEAYTSKTCSSCGHLQEIGSASRWQCQGCGIRHNRDINGARGIHLRALRDNSWIREHVSCISGASC

SEQ ID NO: 691 - protein, 465 aa, synthetic construct
  REGION 1..465: note = Synthetic
MNQELTQHKETEKALQPFWNERCRELSEHLWSPTAIGCADSGLTLPNGWSNATAEKSWFSTTFSHHQNESLSQTSFPSFKFSIQNELAPLKTRKIRIYPTAEQRVIMRRMMGTARYVYNQTVEYLKQDGTKANWMGIKGGILNSLPEWAKEIPYQVKSVAIRDACAAVKNAKMKCKKTGKFNDVSFRSRKAPKQSLFVNMTTINDHSIFPKLLGDMKFTEQVPKEIKHDCRLVLEDNYRWYVVIPVECETAEAPRTKDKAISIDPGVRTFLTGYCEKGIIEIGKGAQTRVIALCFQLDKMQRKMTKVNAKRRQNIKRAWRRLKFRLECLKTELLWKSATFLAKNFDTIVIPPFCATDMAKKAKRRITSKTIRAMMSLAHSRFREILDWQCRKYGSHMLLISEEYTSKTCPSCGRLHETLGGRNVFRCPSCGYQAPRDANGAFNIMLKAMTDSSALQKQGATVNFC

SEQ ID NO: 692 - protein, 332 aa, synthetic construct
  REGION 1..332: note = Synthetic
LKEPGTKASWMGIKTSIISSLPEWANVAPYQVRSIAVKEACKAVSNAKRKYVETHKSTEVRFRTRKATKQSCYIPKSAINEKGFFTKVLGVMQYAEQLPIIEYDCRLIYEYGNWFVSVPFKRTVNIPKTKELIVSLDPGIRTFQTYYSLTGAGSIGQHAWEKILGYCYELDKLTTKLSASHGARRQNLKRAAVRLRYRVTCLKNELHTKVAVWLCKNYKLIVIPEFSAAEMSGRHKRKLTRKTVRAMLSLGHSQFRTKLVQFAELYGSNVVFVNEAYTSKTCTKCGHIHEKLGGAKVFKCPACGMTVSRDINGARNIMLRAMLDQTTSEKLA

SEQ ID NO: 693 - protein, 525 aa, synthetic construct
  REGION 1..525: note = Synthetic
MQEQSKLLEHQQVNACTMSVVFLHQGKNEEKLSIVGLAPETKNQTLNLRFNISEKDIQTTSLLKISEVGLTSKEKDLMPYWDQSSMGMSQKLLSLTETGSAALDLTSSNPLLVNTTAHSWFVTSQSSVLNPNLYKTCFPSYTFSPAVFTVLENTLVRSKKIRIYPKIEDLNQFKRYLGLSRYWFNQTIDYLKKPETKASLQEVRCIQKQEHPEWALDCPQRIREHAMSEACEAVKNAKLKCKTTGKYQEIHFRKRKDNIQRFGFDVQSLKDKSIFSMLKYKVTFHISEKENSELEGTKVVCEDHRWFLIIPQKRHIQRPENQRLPFVALDPGVRTFMSFYSPYVFGKIGDGDFKRIYRLCLGLDRLYSKMATDPSKKRKFKLAAERQRWKIFDLIDDLHKKTAHFLVTRFSEIVIPTFEASQMVTKLRSKTARSMLTFAHYRFKQFLIAKAEEYSCKVRIVSEAYTSKTCSYCGRIQNIGSKKRFKCSCGVNADRDLQGARGIYLRALGALPWVEHLFYPAIVNQ

SEQ ID NO: 694 - protein, 326 aa, synthetic construct
  REGION 1..326: note = Synthetic
LQEVRCIQKQEHPEWALDCPQRIREHAMSEACEAVKNAKLKCKTTGKYQEIHFRKRKDNIQRFGFDVQSLKDKSIFSMLKYKVTFHISEKENSELEGTKVVCEDHRWFLIIPQKRHIQRPENQRLPFVALDPGVRTFMSFYSPYVFGKIGDGDFKRIYRLCLGLDRLYSKMATDPSKKRKFKLAAERQRWKIFDLIDDLHKKTAHFLVTRFSEIVIPTFEASQMVTKLRSKTARSMLTFAHYRFKQFLIAKAEEYSCKVRIVSEAYTSKTCSYCGRIQNIGSKKRFKCSCGVNADRDLQGARGIYLRALGALPWVEHLFYPAIVNQ

SEQ ID NO: 695 - protein, 583 aa, synthetic construct
  REGION 1..583: note = Synthetic
MYKSTGFLAKEYSVTNETILLWIKEGKFEKVKNNPYPKGDITGCGLTNQLPLFSMQEYLAQSKKALLKSKKNCSKGNTLMPDLFLTLPRDLTKIDVDIGPFWNKLSREIHCILWQPHQIELPEPDSHSLSGASNYRGGKSSFWKNQIIPSNYSTSLRYFVSTQKRLSLSLPASSTPTMEKEAQNVITSQKIRIYPKDEVLWFEALNLYRRAYNLTIEFMRKGRKPSSEFRTQICDWCKLECEEHDITYNSNLVQAAYRKACDTRSAVIKKRMKGEKAEMSFMSRNAPQQYFVVPRLSSNKQIFPRILKGCRWTEDAPSEAIGQTVIVTYTNGQWFANVKLNQSVEPTKTQSLSIVALDPGVRTFQTAFSFDSAVSYGDGFVNDRLVPLMLELDALLSVRDKLHCEDKSKQWVKDRLKNLNRRIAKVRARQQNLVDDLHRRVAYDLVSNHDVILLPTFETKQMVKKSTETRKRFLRRKTVRGMLGLAHYRFKQTLKWMAKKYGKTVRDANESYTSKTLWDGSILKNLGGKASILFQGKRVNRDIHGARNILIRFLTKVIEVLSPQGACPLNITKARFCGFGVLK

SEQ ID NO: 696 - protein, 517 aa, synthetic construct
  REGION 1..517: note = Synthetic
MVNLTMSKSSLMLPADLTKIDADIKPFWNSLSTAIHCTLWQPHQIESPELVLPLLNGSSNYRVGESNFWKNQIIPNNYATKLRYFVSIPKHLSLSLPASSTPTTATEGQRSSNEAQIDVTTAKKIRIYPENETLWFASLNLYRRAYNLSIEFLRKGRKPTSEFRTQICDWCKLECEEHYITYNSNLIQAAYRKACDTCTAVIKKRIKGEKAEMSFMSRNAPPQYFVVPRLSANKQIFPRILKGCKWTEPVPSEAKGKTVVVTYTNGQWFASVNFNQSIEPTKSEALSVVALDPGVRTFQTSFSGEDAVSYGDGFVNNRLAPLMLELDHLLSKRDKLHCEDKSKQWVKNRLKNINRRIHRVRGKQQNLVADLHRRVAYDLVSSHDVILLPTFETKQMVKKSNETRKRFLRRKTVRGMLGLAHYKFKQTLKWMAKKYGKSVIDVNESYTSKTLWDGSMLKNLGGKASILYRGKRVNRDIHGARNILIRFLTKVIDALSPKGAYPLNITKAGFCGFGVLK

SEQ ID NO: 697 - protein, 532 aa, synthetic construct
  REGION 1..532: note = Synthetic
MSVKTKTPKHLTISLPKTLDNLDDNVKEFWNEESDKLHSKIWHPHQTISDNKSSNYQAKTGEYWKEVVRPTYNSNSSLSINIPDNLLSFLKEDSVSLKKDGTPVKQSARTLSNKEKHKDTISKKIRIYPEDESLWINSLNQYRRAYNISIEMFKKGRKPSTEMRRRISRMIKHEGARNGWIDNVNLVQEAFREAKTVRTAIIRMRMAGSKCDYRFKSRMEPCQTFVVSRISPKKSIYPRVLGSCFYTESVPDVAVGQNAKVTYENNQWHVSVKDTYKAKDIKANDLSVIALDPGKRTFMTGFSADESVKYGDKFVEDKLLPLMLKVDKLLSKRDHLKKHKSEAFKLQRLKGVNNRIKKLRARQDNLVKDLHRRVAFDLVMNNDVILLPTFETQKMVKRSEKRKSNKQVARTLLGLAHYKFKQTLKWMAKKYGKVVIDVNESYTSKTLWDGSIKTNLGGKHQFRFDGKIVDRDVHGARNILIRFLTKVNNAKNGVKEKVIDVLSPNATYALNIIETADPYRNIRCLGGFGVFK

SEQ ID NO: 698 - protein, 399 aa, synthetic construct
  REGION 1..399: note = Synthetic
MANAVRKEGRTVAATKKIRIFPKNELRFIQALHTYRLAYNLTVEAINAKEKLGSELRRSITDKIKATYTNDESPEHYVYNVDLIHEAYRKCEGAYRAQLKKFKTKGTPFTMRFMSWKYSPRYFMVKRLAKSGFPYPKQLGEIFLTEPLPEESFNKSAVVKYENGQWYISVQQHITVASLVKGETSRICALDPGVRTFQTLYSENQVVKYGEGFSKAILLPVAQSISKWISKRDSFIAKFKDRQETQYYNDMMKCFERKLNKLKARRNNLINDLHKQVAYDIVMNNDVILLPSFNTSNMVSKGKGGKRKLGKITVRSMLNLSHYKFKVYLNYLAMKYGKTVIEVNEAYTSSTFEGKIFSIGSKEEFKTTLGKIIDRDITGARNILIRFLTKSCRVNILHT

SEQ ID NO: 699 - protein, 276 aa, synthetic construct
  REGION 1..276: note = Synthetic
MVKRLAKSGFPYPKQLGEIFLTEPLPEESFNKSAVVKYENGQWYISVQQHITVASLVKGETSRICALDPGVRTFQTLYSENQVVKYGEGFSKAILLPVAQSISKWISKRDSFIAKFKDRQETQYYNDMMKCFERKLNKLKARRNNLINDLHKQVAYDIVMNNDVILLPSFNTSNMVSKGKGGKRKLGKITVRSMLNLSHYKFKVYLNYLAMKYGKTVIEVNEAYTSSTFEGKIFSIGSKEEFKTTLGKIIDRDITGARNILIRFLTKSCRVNILHT

SEQ ID NO: 700 - protein, 529 aa, synthetic construct
  REGION 1..529: note = Synthetic
MAVTTAFLLPNNGGYAMRELAQANKSLVLTRKSVSCSKGILTQNLSVTLPVLSTLNEKDCKPFWNQQCSDIQSTLWLPQKTDSQDLVSSLSNGLLNYQVDESRSWMTRITPLNHSTPQNLSVLLPRSAIATTESDLLKGAKVIASKKIRFYPENESAYFDALALYRRSYNLAVERFRNDDYKDENGKFINMRPAIKAQVEQEQKESGRAYNSLVSDNGTLAAATTFKSVCSKNKKLKGAKSGFSEISFKSRKGSKHSFSIDRLPKGLNPCVKALGKIHLTESVPSEAIGKSCIITCDKGRWFIQVQQHIELQTEIQGEVKCVGVDQGVRTFATCFSKDDALVVGDNFSKEKLFPLMKRVDKLIGQKQKVLNTQKGVKFTDMPQWARDRIIYFDREINRLKCKKDDLILDLHNRLAHELVSNYDVIFLPSFETRRMVTRKDKKIRTIRRNTCRQMLDLNHYGFKLRLKWYAKKYGKQVVDCNESHTSKTRSWDGIIDKKLGSSKIIKGDGFTVDRDINGARNILLKHLTR

SEQ ID NO: 701 - protein, 473 aa, synthetic construct
  REGION 1..473: note = Synthetic
MALTLQLKPEINIKATKDAESYWSERAAKLSSALWLPASKSQQESYSIHHHGWMSTLKPLAAPVSFDVSLPAASLDIKNNQSATIKATKKIRFYPESELKYIQALMLYRRAYNLAISRYIEGSHEDDDGKFYDLRPWVKATCQLEQKEKSHIYNSLICDNAVREAKTTFFAMAKKNKGKHPEQPGFARLHFKSRKGDIHSFRMCRMPAGLSPAVRALDEIHLTETVPQEAIDQAITVTFDKGRWFINVQQHITTKAETQGKVRCVSVDPGVRTFATCYSPSEVVVAGDKLAKKRLFPLMRKVDVLLSQRQRIYNQFAKDIKFDELPQWARDRLRYIQKRSQTLKTKKEDIVRDLHQRLAHYLTENYDVIFLPYFETKSMVRRKAGRVIRRNTCRQMLDLGHYHFKLMLKWMAKKKGKRVVDANESHTSKTLSHSGEVVNNLGGREFINDGEMRIHRDINGARGIFIKTILQVT

SEQ ID NO: 702 - protein, 490 aa, synthetic construct
  REGION 1..490: note = Synthetic
MQQICFIKQDYDRTVKPFWNDACKNLSDNLFLPYNDNKKTNFTIHYLSSLIRKLTPIYPSYFPLTFKSHTTITPDIVVKAVKKIRFYFNSLKQKTQYEQMMMIARRAYNITVDMCNNGLYSAGKGKSLDLRIPVRNKVREEINGSDTVFDVNVCDQAVLEAIGDFIKVCNSNKKKKSKVSQDFNHSSYSKLGFKSRKYKKQTFSHPRMGKKGVCFDSLGKIKVTEKLPDECYGKNVKVTMDHGRWFICVQKNIIVKGNHFSCPESQGKNKMISEKEVKVIALDPGSRTFVTGFNEHEVMVYGKDYSVKCLLPLAKKMRRLYSLREKLSQHKLYKKELSDNPQWIKDRLRFIEKNLNRLACKRQDRVNHLHRAVAYDIVRNYNVIYLPEYETKPMVKTKGRKIGRKAVHDMLSLSHYKFKEYLLWTAKKYGKSVTIVNESYTGKTQSWNGIVNEKLSSSRTMRDGTRIIDRDINGARNIYLKHISLSLTNS

SEQ ID NO: 703 - protein, 400 aa, synthetic construct
  REGION 1..400: note = Synthetic
LHFSLPFVIPSQTKETVSVTRKIRIFPKNKSEIFQLLSLARRSYNFAIEHFKETSYKDQLKVIELRRSIKQKVKEEWTDKLYRAEVAGEAVRHAFNTRQSIIRKRKRGLKCDYKFQSIKQTKQSFVEQRLTKKFMGRFYITEEIPEFSFGRTTVISFEYGRWFVNALEKIELDQGAENQGLGMVAIDPGIRTFATCYNGKVVHKYGKNFFGEKIMPLLLQVDKLLSKRKLFLNKYSKKENRNLFFFDSIRYFNKKIYKLRNRIDDLISDLHRRVAYDLVQKHDIILLPKFEVKGMIKKFHRKIGTKTVRSMLGLNHYKFKQVLQWMCKKYNKHFVEVNEAWTSKTMSWNGFIDENLGSKKTISDGKISVDRDINGARNIFLRAFSVASTDIRFNSCDCCG

SEQ ID NO: 704 - protein, 390 aa, synthetic construct
  REGION 1..390: note = Synthetic
LPSLPISSIPITKNENIIGTKKIRIYPKDESKWFDMLSLNRRAYNLAIEFFIKNAEYTEINQIATRRLIREQCKKEFIESGRTFMGMVTDEAINAAFITFYSILKKRKNKIKCDFKFKSRKTPKQSFIIQKLSKNGIMPHLLNCFITEEKPIEAIGKMATVTFYNGRWFLNCKKLIPITKNDIQVNSNRVVSIDQGIRKFATSYSPKEVNFYGENFVNDKIIPLFKQLEVLTSQRQLILNKLKENKQWINDRLVYFKNKIFKIRNRISDLVNDLHKKICFDLVINYDYIILPKYETSNMVLKGKRKLSKIFANAMNCLSSYKFKNMLKHHCLKYGKQLLDSTEEYTSKTRSWNGIIDNKLSGKKIIKDDNIIVDRDINGARGIFLLALTR

SEQ ID NO: 705 - protein, 547 aa, synthetic construct
  REGION 1..547: note = Synthetic
LRDARGSPRKPSGAGPREGDINDLSGHPEGIAGSGSLSIPTPSSAPACPAPGRSHPLTPRSDSCAIDVPTATLSVTLDPESIASDDALSPYWNGRCAEMQSKWWLPHRTMSPGQSACPPGMSSNFREEASDFWKRTIFPTSSTCDASLRISLPSATPTTASVLVKGTRKIRAYPKNPDLLHEMVRQQRRAYNLAIACFREADTGLVDPKGPDLKQTALRATIRDYVRSEVHERGGTFRSADCDEAVNAACRARDAVIRRRSRGGRCRLSFRSIKDMRQRIAVQKLSGAFVAQNFGLAEPMPDEAWKKLTTIVLERGQWFICAQLHMVTVGQDEIQVRSAVALDPGVRSFVTAYAVNHAASYGDGFYAERVFPLLLQLDRLVGQRAKARCGQWKRHFQKRIDRLAIRVRNLVDDLHRRVAYDLVQSFDVILLPSFETKEMSAKEDRKIRTRTVRSMLGLAHYRFRRKLEWTCRKYGKRLVICNEAYTSRTRSWDGFVNENLGGAKTVSDGSIVVDRDMNGARGIMLRALYGNLGRFRAAGADVALVAE

SEQ ID NO: 706 - protein, 326 aa, synthetic construct
  REGION 1..326: note = Synthetic
MKMSGAFVAQNFDLAEPMPEEAWKKLTTIVLERGRWFICAQLHITTVGLDEIQVRSVVALDPGVRTFVTECPVNHAASYGDGFYTDKVFPLLLQLDRLVGQRAKARCEEWKRHFRKRIDRLAIRVRNLVDDLHRRVAHDLVQAFDVTLLPSFETKEMSAKKDRRIRTKTVRSMLGLAHCRFRQKLEWMCRKHGKRLVTCNEAYTSRTRSWDGFVDQNLGGARTVSDGRIVVDRDMNGARGIMLRALYGNLGRFRAACAEVALVAELVRRRMLTTYTVEIIEIFLHHGYACATSQHYRNTVHCIRGASIRACRGDSEVRSFRKQEFP

SEQ ID NO: 707 - protein, 410 aa, synthetic construct
  REGION 1..410: note = Synthetic
MEVQSNFWRKTYTPKDLTYKLSLAFSLASAIHKAGREQVNVARKIRVYPSEPQKVDRQISVCRRAYNLCVATYREWVKGDSPIDFSDLRRNVREKVRQEAIENGWEICITSLDEACQEVKRANQAVIRKRLVGQKAELQFRKKTTTKQGFIYQKLSSMGLPKVLGDLHLTEELPDESIGKQARLLREWGRYFLVTKKLVLTAEPKIQGNAVGIDPGVRTFATTYSPEQANKLGESFQLNKLQPLGIQLDKLYSERARLFNRWSKLPDQLRHDLLRSIEKKVNKLKQRRNDLVEDLHKRICYWLVTTYDFLFLPTFEVKQMTNKEKRKIGSKVVRSMMDLCHYKFKQMLTWMCQKYGKTLVIVNEAYTTQTQSWDGKRQKLGSEKTISDGSIKMDRDINAARGIFLRAITR

SEQ ID NO: 708 - protein, 489 aa, synthetic construct
  REGION 1..489: note = Synthetic
MSRRKKSKQPTQTSRSSLTLDLGSISNDETLSRYWNAACGDLQSRLWCPIEIDWQEPGSDSSDSSLSLTEGQSSRLIKAVMNPNPLTQKISLASSLASVTPTTANEVVAVRKIRIYPDNERLYWRTLHAARRAYNLAIDAHKRRDGRSQTIVRREIVNAVRDIFQDVPAVALDEAVNESYRTKSSIIRRRTSGEKCDYRFRCRKDTKHSFTVQKLSKSGTPYPTLLGGVRLTEEISDRAVGSLADVIYEDGRWFLCAKISVTTGGAESQGLSVAAIDPGVRTFATVFSFDSLAKIGEDFSKNEIYPMAVRLDRLYSERQKLRNICPRRFVDWKQWHWDRWRGVEKRIHRIKNRIKDLTDDLHRRAADWLTDKYDVLLLPTFGVKGMTKRAGRKIRRKTVRAMLMLSHFRFKQYLKWIALKKGKWVVDVNEAYTSKTDSRTGDVKNIGGATKINGLDRDVNGARGILLRALTRQLEPEIITTPAVADVAV

SEQ ID NO: 709 - protein, 497 aa, synthetic construct
  REGION 1..497: note = Synthetic
LQSTPSSSVECKEEEQLCTEENEKRKMTKTINARSKKKRKTETTVNRTLSIKTYPNHSQKKILKRWLGLMRYAYNTVVRWDKNHIKPQTLNEKLKLYVDVKVGKDPDEKDKKLQRLCVWGERKFLRTVVWLGLRLRGLHNEIPPNVIDESIDEALVARKNVIQKNLKATKKSSLSFKSKKDLQQTMAIRAQNFSKKEWNHFYVRHLHNSSTLSSERYKPNELKGKRDLCPFHFETKRKHNKWPSQKIDCDCKLTYLQKTNEWIFHWVYETQKQVCETQAEVHVVSIDPGVRTPFTWYSSTKGVGKIGEYDIGRIFRLCKYMDDLISKKDRLANSTSKRKKKKALRVDKAIFRMRKKIRQLQNEIHRKTIKFLTDEFDVIVIPPFEVSGMVNRKTRKITKKTVRKMLGWSHYKFRQRLISKAEEKGIHVIIQNEAYTSKTCSWCGNIQKIGGSEVYNCRNCGTVMDRDENGARGIFLRALLDGALILFGDHAGNSSFT

SEQ ID NO: 710 - protein, 565 aa, synthetic construct
  REGION 1..565: note = Synthetic
LKHFKSSGGSGVFGKEKWVIEKKKQLERNKFSKSGSGRKRTIDEATGKVIITEEDLTYFRTVKFRVRFSEPQRQRKILNQWCGAARYTYNAALEGIQKENMPMKIESLRDRYVVAKAATCQRGALPKTEEGLEAKRKRDDAKKAAKERVNYETGELVKAHPWLAHTPPPIRSEAVSKLLKSNWALEKKAEIARSEGNAKRSNQEWQFSKKSKSEPSHSTLSIEHLKLREFEVIDRPTKASSPNAEGRRRKWTQFRMFDSTHSGPRFKCSDGKTLGLLYLTEDLSDPKFGGDGVSPISINHDCKLTRDLRGRFFLHVPVPTALPNPKPISEREMCAIDPGARTPFEVWSPTQYGSFGNDDFKRIILPLCEQMDVLIGRRDRATSKWQRYEWVENKVQGDGPLKSYTRYISRLELRIHKLRDRIQNLVNDLHKRVARSLLAEFDTVILPVFETSNMVEHVNEETGRRRVLNSKTVRNLLTWSHWKFREYLKHKALVLGKEVVVVDESYTTKGCSRCGLCTDIGGSKTFKCANPNCGFTAPRDAKSARDIFCKHIVSMGSIASAQQQH

SEQ ID NO: 711 - protein, 605 aa, synthetic construct
  REGION 1..605: note = Synthetic
VPWFEPHHRDLFDEIPPPTAAAADVAREGGWWATRTWSELPQPSTAAPLRPRVGNLEQFKGSGPYAREHWITDMVAQEKRNLVGGCGRGKKRTADGADAPPPEPTYLRTIKTRVRFVGTPEERNRQIRAIKSWMGSARYTYNAALRGVRAGMPLKKEELRERYVTAKTQPNNGMKPTTDDGWARKAARDDRKKAVRESNGYEVGELIRAKPWLKFTPNVIRDGAVLDLVDAENAMQKKAQLARQRGDSDFQKWTLAQKDRSDPSGWTIKVQHRYIEKVETLPRPTAKAVTTDAHNPNAKRRNWTRITMFSRSKCADGKPLGSIWLSEDFLGKFGPISHDCRLTRDRRGKFHLLVPVATTLPPTKPEAQREPCALDPGVRTFQAVHSRAGHGTYGDGDVERVLEPICTKLAALQSVRDRAVAKWEAGQWTVDGPQETSWLPGTEHGALASYRHVVRRLNDRMEKLRKRLSNLVDELHKRVALDLCTKFDTVLIPTFDTSKMAKRDQEGGGRRKLLPKTVRALLGWAHYRFRAKLKHKALMLGKEVIVVGESYTTKGCSRCGEITEIGGSKTFKCKNVTCGFCAPRDPKSARDILTKHILPLTTMGG

SEQ ID NO: 712 - protein, 736 aa, synthetic construct
  REGION 1..736: note = Synthetic
MHWAVPFTNPLKVHGTNLFDTRLPLCSRTCLGQWLGYVRFTRPRPFCTKLHKPCTSRTLPYNLYTSRTHTYTHTNVHTDTGKRFESLKLGLERLQAYRSSGNCLPLGKQLKRFNKKSSVQRWAGACYFQFWVMARGLKKAKDAGPQPPRKRKKVDTVNNAATASKRPRPGDMCPWWKEELLPIYDKVPMVESNPNIQSIPLMGNSKSWFSVQSIPLRNVSNLDFRSKMEFDPADVWSQEAGADKKAATARKGKELDPIPKKQTRCRKIRIRFLHTEQGNHRKQEATLRKWMGAYRFTYNHAVNLVKQNKGWLGAEGQYLNEQLVYETKNGRTSRPTNTEEEKEFAKECAANMEAKRSRLGVEVGALVRAHPWLLEVPSKIRKEAVRDVLKAEKSNEGMRKSDPHHKWSLKLKSRKQLSAWTMSVPSECITRVSVEERPVDETRIGRNDSQPFPETNVRKWTRLTLSPTYNLGEFWLNEAVPEGKISKDCKITVDGLGRYYMIIPYEIEPTPPTQKPLSERSVGSVDPGDRVRACVADVRRGEVIKYAEGKEFGGKDRIYALCKLLDETISESKAKAVDAKQRLWYKKKMNKLRAKAHNLTTEMIHKIALDLVRRFDTLILPPFKTSEMVKKRQTRNGMAGMVGIQPRKIHSKVARSLLSGRHYEGSVHIMNVFLRAGKEVARMGEEYTTMACKECGVLNDKHSKESWTCKNDCCETFHLRDPASSLCIFKKALARN

SEQ ID NO: 713 - protein, 468 aa, synthetic construct
  REGION 1..468: note = Synthetic
MSFPADSTVSADTAKPPKKRSRAKNREEGQEEKTAEEDEPESGGAFRMRKTRLRLTREQRGVFRRWMGGARFVYNKGVEHVRKTGKVSRSELRQLFASDKGPLAAEHPWLTHVPYKIREQATDDIYKAQKANLARQKSDPKHRKWTFKYKSRKVASSWTIGIVSQCFNQAEVMPRPETRKPRQDGRAYPDVEPRVRRWTKLRLFRDKNNELGDFWAVEALPESVLAGKRGAFALQRDCRITMDMLGRFHICVPIPTETPPVAKPEAERTVVALDPGVRTFQAYYSPECHGGYADGCFSHIFSLCEQMDAKISLQNQQPSTPYMRRMLRAQVWRIRQRIRNLVDETHRKVALDLTTRFDTVLIPEFKSKDMCQKKNREDGKKRTIRSKTARSMLTWAHYRFRTRLQHKALACGKEVATVTEEYTSKTCGKCGHLNAKFSSKTFKCAACNVVMDRDANGARNIFLKQLKC

SEQ ID NO: 714 - protein, 548 aa, synthetic construct
  REGION 1..548: note = Synthetic
MAADTKLQKFEKFWTSEHEELSKKLPTPNTSTKYVSTNNGLLNSVMRIDGHANEQTHSEHQQKKTNKPKVVKECQEIDCAELRYQKYSVCEEHFRIMSTSDSCFTIVSTKKNSGNRCNCKTKQYGLCGKHLPKEPKSKDKPKIGIYTRQIRLYPTMEQRTILKQWFGVARKVYNSTLKICQSRPKLNKSLDNLRFRIEKKLYHKDYISKVPYYIKDCAISDYIKADDNARLKYRTTKKCSQMRFRSKKQPSQSIEPKPTSTKPILNSNNRPRLLQVYTRYMPPIKTKEDIPDFSSCRIVMKYGREFYLSAQVKYELPQKNQVIDLDKTVAIDPNAKNMLAFYSTSTAGVIGENINQLLDSKNSKISRLQHFESKTPNKRIKKMLRRKIIRQYNKREGIRDEIHWKLANALLKNYDTIIIPEFQEQKKCRTLYRTTNRQMFGISHSLFRNRLSHKADIQGKRVIVMTEEYTSKTCSQCGHYNIPTDRQYYCFNCKLSIHRDVNAAKNIMMKGYIELLGKVCSQNIISDDISSKDSAMGIENRDIIDNTD

SEQ ID NO: 715 - protein, 586 aa, synthetic construct
  REGION 1..586: note = Synthetic
MILNNSQNTYNQDIQDIELYKILDQDLITNEEGCVPFWNSQCKERSKKLWLPTKTDSVGLGLNSSNLLSKEMVEKSWFLTNLQSNHQMKNLSKTFSLSSTYFPVDSMGLENTKKKSKKILKRSKCLLCEEDSYMNVYCKEHYEEKRDNCSCNICIGINKSGKNKGLPCCKTTIRDTKLCNLHDSSLVKQKINDKKQEKNEYDTLCCKIKLKPTHSQKNVLKQWFGVGRKYYNNSVNHLKEKFETFKDLRPKIHDEIGNIDYCKIVPRVVRDDCVDDACKASSNNILKYQDKGTISSLRFRTKKDTTQSLNIDYRNCKIKKNNSIAIFPEKIMEGLKFNTSKRNKKTFKKTFNFIGLKDGLTVIDKSCRLTMKHNSVFYLCIPYLVEKQIKKTKRVDIICAIDPGIIDFVTFYSEKSCGSLGIEARQRILKLTKLSSILQNKMKKYKENGNKFKYTKVYQEYRKVITKPTRLVDEMHKKIALYLCRNFSTILIPDFPTKEIIKHIYNKDVKTSYMRLSHYKFRMFLIHKAKQYGTIVCTCNEAYTSQTCSSCGNIKKVKREYVCDCGLDLGRDINAARNIYIKYSTL

SEQ ID NO: 716 - protein, 404 aa, synthetic construct
  REGION 1..404: note = Synthetic
MISRKVKIFLSGAQKHEFLKWLGTCRYSYNLAIDELNNSYKTGKLISKYDLRTKLVTELPKELEWLALTPQGMREGAVFDAYDAFMTNLKSGKKFQMKYRSRKARSQSCLLPVDSLKIGMKLYPKILKHLSHIKIHPTEEKHFSWRVKQIKDLKKMAEAVDKKKIIMKTCGQILESPIRIQKTRTGHWYLCIPSETHEIVPENQGNLKLVSLDPGVRTFLTGYCPDGELIKIGDNDINRIRNYCLKTDKFISKIGKMKGKKKYRCQKAKLKRFEKVRHTILDCHRKVVRYVVDNFDVIILPLFQTSAMSKRGNRKIHSKTVRNMLTWAHYKFRMMLADDLRKYPHKRLILTTEEYTSKTCPCCGYVKMNLGGNKTFKCDKCKTIIDRDVNGSRNILIKYLTEKC

SEQ ID NO: 717 - protein, 420 aa, synthetic construct
  REGION 1..420: note = Synthetic
MEKEDIVVKTKKIRIYPNSEQTKIFVKWMGTARFMYNKSLNFVQTNKIYPNYYNIRNKLVPSNTIQQNEQWLLDIPKDIRAEAVHEMCIAYSTNIKKSSKTHKKFDMKFKSKKYSQSSMTITKENFKNGKIYPKILGENNCILNSAEPIKFNKVTKVYNIKQKIKDRKTKKTTEIIVKKTVEKELINGDCMIVRNKVGKWYICIPEKVKCNTENQGMRIGVHDPGCRTFQTIYSPNGVCFKIGTNAVKQIRNFCLGIDKMISLRSTLTGKKKYRLKIAIDRKRLKIKNRIIDMHNKTIKLLMDNFDIIIIPQFDSGKMTNKIYRNINSKTARNLLSLNHGEFRQRLVNKINEYKYKYIIICSEEYTSQTCGKCGKRNLKLGGNKTFKCPFCEFKMDRDINGARNILLKTEVELASDSSLH

SEQ ID NO: 718 - protein, 548 aa, synthetic construct
  REGION 1..548: note = Synthetic
MTGIQKLDMHDPPFWKANLCEEYSKWWMPTTLNNKVTLSSYPTGSWFSHVQYHYPSGSKDKLLSPTVSTAPPCLNKPASKKRKRKKRRKESDSDTDSTKRQKSRPTKPKKSVLFASQKVVPENKVLRTFTMRIFPTKEQTRAFKTWFAAARHTYNWALGVLKNHHRRGLRVLTPSNRVHLKSNFVTAKPSRFPRRLRWMRNIPYSVREEATKELSMAYSAAFRRLEDGLVEVFDNIQFRSARSRQPAAITIPTQNFSKAAGCRWDMYTRSLPGKGKLRFHKRDVSRILEKYPEGPQNAVKITMTRTGRFFLHAPLLVEKQQVSDNSIGHLVSLDPGSNPFMTYYSPTKMITGSFGTTEDLNNLRMFQQRYDATCSLLSADSSPWLPPKDRKRVVTKKLRLHEKVRNRVNECVNKVTKFLVDGFQFIHGSIFEVAQIVERPTFINPEGEQRKGKGRLRSQTRRDILTWRHAPFKKALLNKMELYGGSLVVELSDEAYTTKTCGRCGHQNDVGGSKSYCCKNCGYRVHRDVQGARNHSLKNCVGKYVWVT

SEQ ID NO: 719 - protein, 264 aa, synthetic construct
  REGION 1..264: note = Synthetic
MTKDTLHLLRCSQPTLIQNSQPRVPFGAFLASPKKQQVSDNSIGHLVSLDPGSNPFMTYYSPTKMITGSFGTTEDLNNLRMFQQRYDATCSLLSADSSPWLPPKDRKRVVTKKLRLHEKVRNRVNECVNKVTKFLVDGFQFIHGSIFEVAQIVERPTFINPEGEQRKGKGRLRSQTRRDILTWRHAPFKKALLNKMELYGGSLVVELSDEAYTTKTCGRCGHQNDVGGSKSYCCKNCGYRVHRDVQGARNHSLKNCVGKYVWVT

SEQ ID NO: 720 - protein, 386 aa, synthetic construct
  REGION 1..386: note = Synthetic
MRKFRLSPSLEVASQLRQWFGSVRVTYNWALSCIKAKPKEFPVNKIWLRKRFVNSCNIPKQKGYLLQVPKHVRDGAIEDLVLAYTTNFAKRRNNPDHKFDIRYRSKKESQSIVIPFDAIKSIDSDDGLKMYPTYLKNRIKFHTRQFRTLPCYDCRLVLDKLGRFTLHVPSVAACENQAGTLDAKTEWCSLDPGIRTMFTVYSPTPGIAYKLADRDISRIYRLCKHLDDLCSLATKRKRCNRSLIRQRERIRHLVDEVHWKIIHFLTTSFSNIILPSFEVSGMVNKCERVLTIKSVRQMLSWRFYEFKTRLIERCKRLPDVNVYIRGEEYTSKTCTNCQTIKEDLKGAKTYKCTHCGLVADRDACGARNIFLKSAVCSADSIATLRP

SEQ ID NO: 721 - protein, 387 aa, synthetic construct
  REGION 1..387: note = Synthetic
LALSAINQKKSKININDLRTKFTNNSKIKEDNLYPYLLETPKHIRDGAINDLVGAFTSNFKKQKLDPSFRFEMKYRSKKQEQSIVIEANSGAYLDPEQRLFHMYPAFLEGSIKYYIRCRDRRKTLIPSIEYDCRLTLDTRGHYYLNIPCLESTSDNQTGRAKHVWGALDPGVRTFQTIYSPEYGCAYKIGTGDRSRIYRLCLALDGLISLRDKKFSRRTDQKGKINHQSIRRKIKNLRMKIKHVVDEVHWKTVHFLLTHFQNILIPSFNVQDMVLKKNRKISCKTVRQMLGWSHYKFRQRLMSSAKRVNQSAPVWTRRNVYVVGEEYTTQACGYCLCLNKHVGSRKQYCCQKCQIKIDRDLNGARNIFIMNVRYEGERMVLKRRQPC

SEQ ID NO: 722 - protein, 592 aa, synthetic construct
  REGION 1..592: note = Synthetic
LEKKFTSISTSAIPFACSRGERQPQCLECPKGLSESCLMKETSDASGCQADIDATISLDMSLRLKTWQLNKIQSMHIAESPDSTKKKTSSDKLSTCRTNSQDTLSSPTSVQESTSNDKVCKPFFDSRCLEMSRKLWLPTKTALQGLPVTYWSGSSQPTIRNSWSSITQLKASKETLPKTSWPLSTFSVAEQMVSEDIQKNTRKTKIPKTKTKKKALANCTRKIRIFPSPEDKAKLTQWLGCHRVVYNRALAFANKTKNRNYTEMGKRFVASRNIKEKWLLECPQVIRSVAIRDLKAAFDSNFAKMAINPEHRFELKFKSKKEGAQACRIEAKNSALKITKDGLLSFFPKSLKPMRFEKKSLEGINFNYDVTIVKDKLGRFSLHIPYHRENQPVKESMSWCAVDPGVRTFATVYSPTAVLKIGDGAATRLSRLLLCMDNLMSLRSTTKGVQKKRRMGKAITRMRFRIQNLTKELHCQAANCLTREFTDIVLPPFETQKMAARLGRKLTKKTTRNMLTLSHYKFRVRLQNKAVSRGCRVHVLGEEYTSKTCTRCGTIKANLGGAKEYKCSHCDLIIDRDVAGARNIFLKNISGP

SEQ ID NO: 723 - protein, 574 aa, synthetic construct
  REGION 1..574: note = Synthetic
MKRKKKEVQKDTKRLKQPFSVNNQFKNTSIDLWLPTQIDKIENLMENKSWFSINRMSSDNNLKLDSYQFTPKIEQKVSKDKTMTLSKKIKLKLNNKEKKTIDTWFKGYKKTYNLLIDYHRIHKKPFYQHASKEKVVKEPLTLNQIKYYYKSKKFPYKFHTTVECREKLTSIFNILKKLDTKKNRDFNNYKLITFLVRTFNIVLNQENCVITKCQQKDELMHYCINKDSPMVKEYPFLLNTPQDIRDKARRHFISTLESNMKSKKTFNLSYKKWYQNTIEINSITFNNSFLNDKYLYPTVTKRSGNELIKLRSYEQLFESSGSVKISKDRVGSYYIHLTFEKKVQKERKPRNIIALDPGVRKFLTGYDGQDVFEFCGKEFGKIGKYLKEMDIINSRMDTIKNRMNDLSKEIKTLENEEEKRDKSRIRSKLNKRHKRHKLAWFRKIKKVKDVRDDMHKKVCHYLVSNYNHIILPPFETKQMVTKLNSKVSRNMTTWSHYQFQKRLKNKCKEKGVLLHILDEEYTSQICGNCFELTKTSDEIYECNSCQLKIDRDAMAARNIFIKHCCLKPFSVETH

SEQ ID NO: 724 - protein, 241 aa, synthetic construct
  REGION 1..241: note = Synthetic
LGTRDDWFEDHRVEAECRLVYDRRVGTYTLQVPVEIDYTLPYAKRSVVSIDPGVRTFLTYYTPDGETGEIGKGLRTIHRQFGAIDKISGMIKRREGNHRRLRHLRQARRRIYNKVKYLTNEIHWKAAAFLCGNFDTVLLPEFGAAAMLKKRGLSSRTKRDMQAWAHGRFRERMLHKARETRTRVVVCGEAYTSKTCGHCGWQHDRLGSSKTFVCGQCGKVFDRDVNAARNVLLRNLAAICP

SEQ ID NO: 725 - protein, 287 aa, synthetic construct
  REGION 1..287: note = Synthetic
MRQKVALWGCPSKRKRQLDRLTARMPGGEQASRTQTTLRYADGRYHLMIQCLSDKVPLRDRRPVRAVALDPGVRTFMASYDMDGRFGAVGDGQIGRITKVAQRADRIKSHIDTQLVNQGFANGDNNKGRRKRARKRVRQLNAKCRDLKVDAHWKTAKALCQRYDHILLPKFNSRGASQVLSKTTTRQMLHWSHYEFRQRLQHKAEAMGVKVHLVSEHYSSMTCGRCLYIEESFRKNASKWFECRNCGYVIDRDSNGARNILLMNAERYIGRLEAFPLGSDTGAAAAN

SEQ ID NO: 726 - protein, 604 aa, synthetic construct
  REGION 1..604: note = Synthetic
MTMSRPPPSAAVPVGFEVVERPSASREEVIASSKKRRKAKRASASCNTKVDPAKTDRRVFALRIRPTTAQKRLFQRAFSIACLAKRLAYKFIGDQRDGITKTRLYAIKQAICTENIQSRERVNPDDPEDKRMRIVKRTENTTLPPATRRILFEQRLPKGDRLISSVRTNAVIQFCHAINATKALVEEKTINWDRAAQAHERYLMMREDTLVPITTPQTASASTPTAKRRPAATKRKRGNREDTDEGIRTDRYGVARMWTCRHPPRGDRPEMRPRQVKPPDRNRPRHSFSVDAHPRKTNPDSFTVRWDSKECRDNSTVVFMRQKVALWGCPSKRKRQLDRLTARMPNGEQASRTQTTLRYADGRYHLMIQCLSDKVPPRDRRPVRAVALDPGVRTFMASYDTDGRFGTVGDGQIGRIIKVAKRADRIKSHIDTRLVNQGFTNDDDNKARRKRARKRARQLNAKCRDLKADAHWKTARALCQRYDHILLPKFNSRAASQALDKTTTRQMLHWSHYEFRQRLQHKAEATGARVHLVSEHYSSMTCGRCLYIEESFRKNGSKRFECRNCGYAIDRDANGARNILIMNAERYIGRLEVSPLGSDAVAID

SEQ ID NO: 727 - protein, 648 aa, synthetic construct
  REGION 1..648: note = Synthetic
VCESGWLKADMARRAADPPPVEFRVTHPPEPSAAARDAANKAARASKRRKTAKSVKTKDVPRRIFSLRLDPTPAQKRFFQRAIGIACLAKRLAYRHLGDQRLPVTAKRINDLKKKICTEHFQTRVLTGEVSAKGKPRFHKQKADQPNTFLPEKTRRRLYEQDLRERAKVHRDTTEAAWCAERKWKRSRKTWTPPLDQRPIPAVVRCNAVIRFCQTVSTIQALVEEEGIVWDARSAASRVSPPIARSGRARVQSATSKKRKRTKEPNAPTTTAGGPPRRPRPSMGPRQVKPTDRNRTRQSFSIDATPGNANPYSARWDIVGDDRVHFMGTAVRLWGKPAKRRRELARLSARMPDGQRATGQQVIVRYESGRYHLLVQCLFAEPPKRAAEPDRAVCAVALDPGVRTFHGNYRSLVFVSLECRRLTLFACPYIHIGMYDLDGRFGEIGAGQIQQIVRIAKRAGRIRSHIDRHLQDRRPGDHNKAKRKRARKKVRAAMLKTRDLKSDAHWKTAKSLCERYDHVVIPRLPVAKMVQTLARSTSRQLMHWSHYQFRQRLQHKAAQLGVCVHVVNEAYTSMTCGRCLWIEESFRRNSSKHFECRRCGYAADRDLNAARNIMLKTIEAAVGTLEAVPPRVDVGGAAGLALAATTID

SEQ ID NO: 728 - protein, 630 aa, synthetic construct
  REGION 1..630: note = Synthetic
MYQAATQLNTTRLTSAHCGNGVIVGSLTSLRRLEGSVDMQSPKQLKIVRIRGSKGPKSTSAIAASPLPSKKMTLLGKRQQCEQSSQTTPSSPISAQVSTSSEGGCRPFWSEHCAEKSKMLWLPTAIGSHALPQNSSSGSFVPVEQTSWFNIQQWQHQKQTLQKTFSPSLQCLPVGAMDADATKPPRPRKMPKYKDADERPFVCLEDGCGCRFKKKFMLTKHHNQKHLDCITVSRSVRLYPNKEDTKVLRRWMGCSRYMYNEAVNYINENNVYQYEAIREVLTKEENLPRDWLKNLPSDARKYAVMNACDAFKSNFAKKEKDPSHTFEVKTRSKKSSVQQFTFEAKSLRVLKEEGNTLRLGIVDTRVHQLTQEGIACSIKHKALIDQSRDPILQMDKLGRFTLIIRYWKPSQLETQEQRSRRSSIVSLDPGVRTFMTTYSPDGTSYKLGDQASNRIYRLMIVDDKLQGRLQTNLRCDGSRMSKANRRNLRQSRVRLSERIDNLVTELHWKVANFLVSRYEEIVIPPFETAKMSKRYEATRQQWRKIGKKTTRQMGRLRHFQFRQRLLYLAKCHGVQVHVVTEEYTSKTCTNCGDLHQTLGGNKVFKCASCGVAYDRDAGGSRNILIKNMNF

SEQ ID NO: 729 - protein, 339 aa, synthetic construct
  REGION 1..339: note = Synthetic
MYNLAIEKMLDTGRWHWKGHKVLTTYDNIPKNEKVRLLPTNIRKEAYREASTAMAKAPHKNTVKFKTLKRNGRSLRVFGAVSIVDTPDGKRIKLTDSQKHKQLSKELIGFDQKNLADIRIGSSSQIVYDGKWWLLSPFEVERSNVPKKHAVALDPGVRTFQTTYSPDGTSKKLGDQASCRIFRLMKYIDKLAVFKDKRTRGKRLRLERRVGNLVDEMHWKIARELATDYDTIIIPPFETQKMAKKWKNGRYRKINKTAVRMMLRLAHYRFRERLIHVANKLGTRVVICTEEYTSKTCGNCGVVNADLGSAKKFKCPRCHIHVDRDGNGARNILIKSVCC

SEQ ID NO: 730 - protein, 578 aa, synthetic construct
  REGION 1..578: note = Synthetic
MEEENTKQEKIQTKKLRKTERKSIQFDTTKKPCKYIIKKNFNGKIYGRECGDITETESVNQFCIDHINKNENVKYDILTENTCEHIISQMSRGKDRKGMKCGKFTLDSTDKKYCTDHVKRHKDSENKNTETVERTIKIRYYPRSDEKKKLEKYYGCCRKIYNMLCDSEKGYNIEDEIDVNLMKNIIKRSYEISPNIMDPIEIKRKDEFTELRDKYVTYLGNKDGNEYMKDVPKEIRAFAVKEYITGKQNSKMQYKKKKAINEFCIKEYGKKYKPKKIKKSEMKYRKKKEEQSITINKDAITVENGNIYCYKKSFTEKPLILRNATKEKREKKYKEIIKNGIKHDIKIIKNKINKYYMCITYDTIKKKNEIDNKKVIAVDPGSTNFLTVYKENEILEIGRDNIKILEKLRKKIKELKKKRNGNEAKKLQIKLKNKVDDLHYKTITKLISENDLILIPKLNVGKIVRNKTLPTPVKRNILDLSHSRFMVRLKNKADIDKKIVLNVKESYTTQICSRCMNMNKVGNSKIYDCKKCGLRTGRDMNASKNILIKNIKEIKVEKMKEMPLEILKKKEKKSIKIE

SEQ ID NO: 731 - protein, 522 aa, synthetic construct
  REGION 1..522: note = Synthetic
MRKKPARKKKSKIIKLDEDKIPCKFIVSRLINNIKYGRTCGDLVLKDKNYCSKHCNEEQPSFDKHALYLCKHIISQKSRNKDRKGMICNDFVTENNNYCTHHINQHNEEINGTKTLRSFKVRIYPTNAQKLKLEKYFGSARYTYNKCVEDKINKIKFDELRNKYVTKLPLTYKFLKDCPKEIRAFSAKEYLTGLNNSNDAYKSKLNREHYLREKYPKRKNKNIQKPEMNFRKKKNQQSITINKNSIKCNGESIIIYPDHFGKEPLKLKKKCIKNDNKLIKLLKSPIYHDIKIIKTPTKKYYLCFSEDVSVKDNVLLNQTLINSTNVCSIDPGIRTFMTSYNENKIEEIGTNAGEMMIKMIKKLDNDKKEYIKSIKQHQINKTEKTLKEKNRLKNLHKLAQEKIKNRVNDIHNKAITKLIEYDLILIPKLNLKRSLISKIVKRASIALRHCKFADKVAEKAYLNGKVVRFVKEHLTTKQCSNCLTINEVGSSKDYNCKKCNLFCDRDHNASKNILLNHLTNIK

SEQ ID NO: 732 - protein, 636 aa, synthetic construct
  REGION 1..636: note = Synthetic
MMANNKLSDVQKKDNYNKWLQKQKTFSNLSIDHLKYISSLLWFPFEKPTKVKSNSWFNIESIINPFFDPYTNFIYDQFNIAKNKILNEILNHFKCDSNKILEIIEKEKIIDDYQKQNNIKVKPNKKHKSKNVLFDPLKIPCKHIILCTYNNILYGRECGNICDQNTNKCKDHTNKNDNKCNKMASNLCTHIITQKSGGKNGKIVVDRKGMFCNDFTFKSSNPKYCPEHNKSHKTEDLENKVTEQRAFKIRFYPNKNQVNKLEEFFGSYRKTYNLCIENDVVKNMTKKEVKKKYVTDCENHKYLKNIPEDIRTFAVSEYFTNYNNANDKYIKDKEREQWKANNYLNYTPKNSVLPKMKYLEKNESQSINVDKGAIKIVKKKIIIYPKIFGKNKLLIKKRQKKDKKFNKLKGNINHDIKIIKTNTDKYYICFVADNEIVKKKEKGLTIAVDVNIRNLVTSYSEKESSEYGANIYDSLRPMIEKRKNMKKEKNKKGEEMVNEKIKNKINDLHYKVIAKLTNVENKLIIIPILNVRNMLEKDETHKTTKKMATIESHSLFIKRLKEKGKLNGTTIKIINENMTTQTCGNCFNKYIFKGETYECKNCGMKIGRDINSARNIFIKDLGKMKEYVNYLININK

SEQ ID NO: 733 - protein, 515 aa, synthetic construct
  REGION 1..515: note = Synthetic
VKACEFPIVKCIDGKTQARICGRFFEEEDEKTCRKHVDMKFPEFDQYWPFTCQAIIKKQGTGIEEGQSRKGFACGEFCQENEQYCRVHQKSARKPKNPLIRCIKVRARPNKEQRQILEKWFGDKRKTYNLMVEERLEEQLDCKVFLKEKHEMEGKFKKEHVTDCLEFLKATPKDVRAAAIEEYFTGVINAWNRYEDRKKSEQWKRENLKKHKAKVINPPIMKFQRKYDQQCISLFSASTSAVTLPRDSEDELRLKYPRQGIRLYPRTFQDPIILDRRSRRNKTLQEILKLNIQYDYKLLKTKTGKYYFCLPYAATVKPTTATKQAACDGGVRTFQTVYSPQGSLEEYGNGANETIRLYQTQIRNLRMAYFKSKSLRCERIRQYRFLLQEKLKNMVHDLHSKTANSLCNKYKTIILPYYGIASMMKSNKVTSATKRENLALSHGLFRNRLISKAEIRACDLLIPPNEFKTTMACGLCFVENRNVGGSKIFICSNCGLIAGRDTNSGRDIFIRQLTY

SEQ ID NO: 734 - protein, 628 aa, synthetic construct
  REGION 1..628: note = Synthetic
MTALNSLKLEKLPNILESQHNVSENGRNREELHRKEQLKEQDSSSFLSISQKKHLNRSDIKSSIVESLPPSSEEILTDKSLSQEKNIPNMKSSAISDPGLTGKGQDLEESWREHQKERYKKLLSFTGIDYVDLGSKSLNTSLASTRQDLWCTNKTSINLEPKNFLKTSWLSHTSSHVPTTDQGNIRAKKVKFLPNKTQKKILKMWIDHYRFTYNQAVEASKANGYTSNLKEFDLKKSLVTEKNLPEKHKFLTKTPYDIRAAAVFELCSNHKSEVTKNLKYYYKRLSDFKKELSKKIDAKEKAKTEKTKLKHQDRINELEKLIEDLEKNPTYNPDIKFKQKKAKRIVMDITKAKCDVKNGSITIFKRTLGKLRTKEKIDDLQHDIKISWDKSSGWYLIIPYTKPDERSQNPSANFIAIDPGYRTFLTGVDSNGRIREYGAGWYNDLNKNVETLDCLKENMKTQRENSKNHSYSNKERQYYRVLSLRTKKTMQMCETKILNKINYMHKKFARQLLDEYETILLPKMNSKNMVKQDLSPKINRMIMMGAQSKFHDYISFQGKGRVVKVDEKYTTKTCAKCMVRTDIQASKIFSCPSCMYTADRDINSAINILNKNFGVFRNTPTVDNADAC

SEQ ID NO: 735 - protein, 533 aa, synthetic construct
  REGION 1..533: note = Synthetic
MVSQSPYWEDDHVERSKEILNSIKLTLPKETKINSPTETYSWFDSSYEEFDVEKQKGLWKDFFEAHEERWGETKREKKTFVSKITRIYPTEEQKKTLVRWNNDAKLIYNTTVGTLNGTSKKSNKYQLRNDLVIAKNTKVTDPKILLSMERTPKDIRAKAVFEATAAHNLSLKKTITLNPKYVATEKLITKTELSMAKLEKERARKKNPISKEEFTEKTSDLPNLECLKEDLKWIPKFQAKNSNLKFRTKKDQYSHIFIPKTAAKIKGNNLQIYPNYKLGSIRIKPPRTKKTQVKITSDFQIRYHRKLDVWHIITSEEINLAEKREEYKTVVIDPGVRAFLTCIDSEGLIAEIGKDWALDKKIKERMFKMDRADRMSKEPLKGKRGQERFNSLIAKRNFNLHRRKLHNMINDLHKKTANILLEEYDVIVLPKLRAKTILKSDDGLGNLVNRRFSLLAHGKFHDYITWKAQTLGKTVIDQSERFTTKTCFSCGVLNDIGPSKVYICESCGNVSDRDVQSCFNILTRYMGSYTPRT

SEQ ID NO: 736 - protein, 606 aa, synthetic construct
  REGION 1..606: note = Synthetic
MLCHLHYYDQVTQPKSLGYRAPHCEDGNAKEESAPSARRADTGDLTRMFSQDVPPSPSQDKKNVENTTPTAASARQNKRTISNDKLKPSKKRTRNTKSSRTSGPASTLSVRDSYGWWTKSCEDVSKKLWSPTEIDCAALPTNSSSGFVRSTEPLSWSRIDSYAPQSKSSQRISWPLYMSSRAGTTEPEDTPKSLVRCQKIRLRPTTKQAQKLREWMKAARDTYNSGLRLIKDGKAKPSLLLKKLVVTRRKEDGLKARQMKQTPADIRSRAVMDLLDAFKTAQAGFKARKLRERTQKSRWRKRKKKEKNLGRRRWRKRVAYHINYKSKRLTRDSFGFEGEKSMDIKDGELFLFATRKKFGMQEGIKMSEQPGQPIDACCRIQYVFGRWYLLLPYKAEKEDACLGDGRIGALDPGVRTFQAFYSEDECGEIAPDTEKVALAMTKKISGIRELIDILKKIGGHRLKINRLTKAWYRANARASNLASDLHFKTIKFLFGRFDVIIAPRLGVASMLRRDSNLSTKTKVTMRFQQHGAFDNRLKMKAESCGKIILDLEEHGTSLTCSSCGQANRKLGSAKIFKCPRCNFQADRDINSSKNHLSKALVGKKIY

SEQ ID NO: 737 - protein, 552 aa, synthetic construct
  REGION 1..552: note = Synthetic
MSPQQKLLKNTIFLNLHSEDGDSLEKLNISRQRGITSGTLNQASEIQSQIQDQESIIAESRPTNKRMTSKGKRKSLGKTSRNIKSSKTLGLDSISREKDSLTWWTKSSKELSVKLLSRIGTDSVDLRSISWNGFVNDQIANSWFKTRSSNLKIKNSQKILWPSFTSSLTSLTEKDVTRAKKIRIRPTSEQIKILRKWMEDYRKTWNMALKLVKEDKRKISLDLKKDVVTKRKNDSEKLIYLKSSPAVIRKGAVNDLVKANKSAWALYKAKLKESKSNWRKNPFEIKYKSRKSNTGSFPLDKVYVKKNNDESFSLFNEPKFKMILKAKNVPDINKDCRITCVFDRWYLIVPETTKSIKRDIQEEPKVIGIDPGLRTAFSCLGTDGSIFEIGSDVNERLYKINSKLESIKTRMNTDVSKRSRLKKAWHRHLMRTKQLCDELHWKTINFLTSEYDVIVLGKLNVKSLMMSNNKTNKKLLSFLSFYKFRQRLEEKARSRGNLIIIQNEAGTTQGCPQCGFKKLDVGSSKVYKCDRCSFEGDRDIKSALCMIIKSCS

SEQ ID NO: 738 - protein, 811 aa, synthetic construct
  REGION 1..811: note = Synthetic
MQSTSTVDEFKIVEYGFPDTLLHRNNGALTRASDLIGRKVFYWRNKKCTLTRRGEMVLKPTANPDHVTLRDIYVIEDDGTLHSITSFTRPTCRGWLSRHLAVDWANVVDQTFIHETLNGISEHLVVQSTSYQERTYFMVNTLYYDLKTYVVNHKICMSEQNKPVPNSVSPQRPSVGGPSAGTSTQSAPTATNTSTMSIPIKKPRKTSGSKEPDPDNSPKPQRPKLSTVESPPPSKKPISKDKSSVSKKNTLTMKSIRKLQVESTSNGKHSTGFWNERCPGNSKRLWLPTGTDCVGLPGTISSGCSRNSESISKWTVTTTTMPLPPNNSLMTSCPSFTCSPADTTVFEHNDEKTKHLKTRQKARQKIEYQNAKRLQRDPTVINLAPSDKTIVRSRVVRVFPTLKQRKRFDDWLAAFRKTWNLCVDDTYKHPDDPIDERVLRDKFVTRKTAVIDNKKNEWVFRTPKRVREYAVKDYFASVKSCETKLKKKQIKKFRMGYKVEDDPRQTISISNEALNRVKPKPSVPPKSSKKKRAAYDQNKEMLLGMTAQELRPLAVEAGIKKPENYTTDDLVEFILCKGDDSAHQINIHGEIVRTKEHVLFSDLESNARLTRSGGGWFLQIPYYTTEDELQSKPMVDNDDIISLDPGVRKFISFYSPRGDCGVSGHDLSPWIGKMLGRIKNAHNKRKRAKLTRRLENSVEDYHWKLCHWLLRNYRTVLVPRLYVHKKAGKYLRDRQRYMKHCGFVDRLRCKVLNYPGRRVIECKEYWTSKTCGKCGVVDKKMQSEEVFSCRKCGFECDRDINGARNILLRNM

SEQ ID NO: 739 - protein, 442 aa, synthetic construct
  REGION 1..442: note = Synthetic
MAVFGQMFVGAASLVKHPKHFVLLRTPKVPRQQAVKVVISVLKAHHTRTAKWKAKRDFHLAQNSRVKTTRDRRAPRFNPGFKPNTFSSDSLSVEKVSISAAGEVAFHLFRNHQSILQSKYMVQHQPKNPRKQLWKTKYPTRNLRVASAGDVDQIRALERDFKVHFKLGRWFLLLPVAVSVTERLPVFKAPQGHIGLRWTEDVQSLAGADDVVAIDPGVRKPFTCYSPQGRVDVLGVNVLKVASKSLWRIRRRRAQLKAAQQGFLEFREKHLRQKTHYMASEPTRAAREVYIRGWRQAKRREAQVVHRVHQRYRRAEQKQRNIVKNFHYNVSHYLLRRYKVIILPSTSSHYWRKGKRLTRSTKRLIQFLALGSFAARLVQTASFYPGRQILRGSEAYTSKQCGRCGTLADKLGGSEVFRCRKCGAQGDRDVHAARNIALRFLQ

SEQ ID NO: 740 - protein, 294 aa, synthetic construct
  REGION 1..294: note = Synthetic
MNWINSLDKDFKVHLSLGRWFLLLPQVVNVADRISVFKPPQLHAGLRWVGETRQSLDDADEITALDPGVRKPFVCYSPQGRVDVIGTNVKKVAIKSFRRVDRRKSAFHHAKDAFGVFKSEQLLQKKEWLQHDHSLRECQTQQHNWRKEKRRQAQQLARAHKRYRLAELKQRYIAKNFHYNVSHFLLRRYKTIILPTTSSHQWRRGKHLHKTTKRMIQFLALGSFAMRLKQTASFYPGRKILRCSEAYTSKQCGACGHINDKLGGSEVFRCAKCGEKGDRDVHAARNIALRVLQI

SEQ ID NO: 741 - protein, 425 aa, synthetic construct
  REGION 1..425: note = Synthetic
LIKLEPSSRQVTWLFRLFKDTRTTYNLAMAHLLEKKIHLKPAGVVSLGLVEAQLQKMFVARAGVLALARRHHRLLRTPKVPRQQAVKSVIAVFKAHYTREKKRLAMQARYPHAIAFRSRPRFCPGLKAKRMGGSDSISIEKRSFHLLDDSTFGLYQRMKFGGRAVFNRLKTQAGMNALMPVQCDFKVHFRHGKFYLILPSRRPPKKRVPRIDQEPIAAIDPGVRVPFTVYSPTGSVAEVGTNSQRVLDKHIASIDSVRQRLRAVRYAVDLERVFDWPCRKTKRNQRRRLRRARKRRAGAEDKAKRVIRDFHYKTAHYLLQHFRTIVLPRTSSHNWRTNRLARTTKRRSMMLRHGMFAARLIQTASDYPGSRVVRCSEAYTSRQCGACGKINDQLGSSKVFTCAGCGAVADRDVHAARNILLRCLQ

SEQ ID NO: 742 - protein, 371 aa, synthetic construct
  REGION 1..371: note = Synthetic
VVLNRWFGACRYTYNECVALLNGVGCIPTKQGWFQWLRNRFVTNKNIQGGKVWLLNTPKHTREGAIKDFVTALKAAHTNKKNKNIEKFRMGFRKKSDSEQSILIQKGASGLRVDAQGVHVYKTFLNGPLETRHELQVPVNHDCRLLKSNGNFYLAIPVGVVSKEQVTNISNYCSIDPGVRTFASVWSPDGVSELGDSLATKLYPRLVSLDKLRSEIDTEKEHRKRKRKKAAFERLSSRFQSILKDFHYKAAHDLCSTYDNIVIPAFGSKGMSQRDGRRLRTKTVRHMMCLGHAKFRTILIQTAERMGKNVFVVSEEYTSKTCCNCGNLHEKLGGSKTFRCAGCGFHADRDIHAAFNIFLKFLKETSASICW

SEQ ID NO: 743 - protein, 446 aa, synthetic construct
  REGION 1..446: note = Synthetic
MSTQTAPELSTFQVRLKPTPAQKLVLNLMIKVTNHAYNWCIHLVETKGFKPKQYDLEKVVGKTNSKDVDPDLRMPDDDWFFDNKLSRIKTRAVRQYASDYQIGLKKVKKREYASKMRVEEGKSALEITPGKNLPTEFKTELENEVNGYIAFQKECVNPMSELQIKRYKPKKPEMCLMIFNTSMKGPVLLSRPVSRLPPLDHDMKIIKRPDKKFILCIPCKQSYTRKDFSATEKTFAAIDPGIRTFATVYEPENNNFIEFGNESWFKSSKIQKIQKQIDETNALLTKVRQRGRGAAIIENYERRLKKLHFKIKKKVDGLHGKINGHIRKNYSQVAWGDMAPKQILMKDGLTHGTKRKMQMLSHGRQHEKLARIEGVTMQNEKYTSMTCSRCGYVNKKLGSASRYVCPNCEQDIGRDENASINIWRKYTGTFFRTIGGEHVYEDDVKK

SEQ ID NO: 744 - protein, 489 aa, synthetic construct
  REGION 1..489: note = Synthetic
KQCVQRARLYRVYGTKKQYEFLRQQRGICRHLYNLCLSDINDYYQSNKHLIQYLHFLLDSDEIELTEKQAEAIKKSIYSYSILSESELRRKYQPDSYWKNNDKAWGLATPSNLRTSTIQNLLSNLHTALKTTRGQFQMSFLSKRKDKLSFHIPFSTQQINVKTGTIVPPTPPKIKKKKTKTTVPKKPHKIKEKTEKKVEIRQLKNVVFQYMTNKCPGQGLFTVRVRDKDRFPNSKDEIKHDGQFIYKSGCWYISLVQDVNVHPPTDTRELKICSIDPGIKTPYTVYDPQDGSITEIGTSKDSLERLKNPSKTLSTHARLERIRRLYKRGQSRLDIMKKEAVGRKAKHKCKRMEKYLTRLRHKKKCLIDELHYKTIKYLTSNYDVIIMPYFDTQPMLRQRNLSRRSKQALLDLNFSLFRQRLIGQVEIQGKIWLEVGEAYTTKSCVQCGHIQNLNLSQRIFKCPRCHLKLGRDVHSAISILVKNAEIALG

SEQ ID NO: 745 - protein, 1005 aa, synthetic construct
  REGION 1..1005: note = Synthetic
MALKLVLGGILDEQGAGGRDLLDEQGAGGRGTRDEGKSSEKDEANEKEENDEDDPHFIWFGGSYPSRTMSKGEGGGEEKPEEEEELEEEKDDDVEDETILDTNFGVLTDKKVDGLFKGKKIGSDLSRTTIHVVVFDDDENTRKIYVDRKQGDSYTVQSRLIQHDVRGKKHMWRKFTGKDMLQDAKKFARDPREEQTRQKEAAEQTKARKKEARVAVNGPNPSRTFWDNNYSKVYAMVHNNPSRVAEAFERLPCDARHEVDDRTSSYATLTFKVVFMERGMKDFFRRCNRAHRQFWNTLLAIFKENEEMFVDHKWGEVPVDGKPQSFEQYLYGEVYGFSEGGITRGVKNCAENIPSRGRTLEQVRREVRECWDSVPKAVFWSALNQWKSAFESNFAKIAIAKKKGLSTKGFTVNFRKCGKKPEVIDLPGSGFINFRAETDDSIKNTTQERKNKKIKNAAERKERAKKRAAEKKKFLEETVKSPDNRSNWVCYRNEWYKHLGHRVEYGGKQVEVLKNNVRTTSHGKKLEKRLQRLSASADAPPAPVAAPAPVAVPTPTAPAPVAAPAPVAVPTPTAPAAVAAPTPTAPAPVAAPAPVAVPTPTAPAPVAAPTPTAPAPVAAPAPVAVPTSSTPTPTAPAAAERGEKKKKTLIIAKFGAKVIGAKKKETKLCGSAKSCNEILADEGKNIVNKRLRYNAKTGEAFVDVVVKREKTSSEANKDNKDAVVEKAAEKARGGSTVAAIDLGINPFFVAVNTGGEILHSDKAWRIKLLELRKKIDALQSKIAKRDHTTSLENGSKRTPTQYRKTTRKLQKKLAKMRERLKRVRKDYHYCEAKRIFKFCDTIVVNNLKVQQIAHESKKDGSLSKHARKNMLTLSPGYFVEVIKHVARRTPGKKVIFGCGEQWTSRTCTRCGKVNNELSLSKSFDCRECKFRIDRDVNGALNNLKEVLHKLFKPNGEFKDIPLRESKKPRRRKYQRKEQQQQEEEEEEENVNVLEEGDVENNNIDQ

SEQ ID NO: 746 - protein, 896 aa, synthetic construct
  REGION 1..896: note = Synthetic
MNLLHLLPSRKRQREDSSDEDGSVDDHADQLRQRDDSSDDEGSVEDRADQLEKRPDLEVSVGGTMYLPNGMQILNDDESSNGSSDLGDSGQRYFGNADDVDQDDETDEEVAPTQMESSEETEDQEDHVAPMLLDDGSQQAPEPDDNGGNGDEQEQEQNENGDGIEFEERNDVDGIFEGFATGSVLVVAFAHARHAFFSYDVRADDGALRRKVKGTAEYKRFIQGKEGYVFKEFSKKQLADAKAFAQNPRAALDTRNDKSEQTKQRKQQKTNETEARRNQESRPSNEDESFWKDEYKDVYKAIPLPEEDYDDDVVEKVGELFDNEKCDARALEPKKNMFKKDITDNHKTFAFRVVNKFTTKDQREALRSLSRVHRQVYNATVAYLKRRNRQIRARPPDDEEQNNEETNDEETEEDGDEVEPETDEEQNDADFFAVLRNKKRVRRKVFGLENDDITWGMSNCAWHIPTRTLSLAEMTDCIRDSWKSVPYAVKEDAVNQALMAYETNFAKRKKQRERNEEVKPFTVKFRKYGQNFVINLPKRKVLLDFVQTEKKNFKKPKNKPKKQKKQKNQNKKEKKKKKKKKKRKAKNKRTRDAPVGEHKNDKVHFFARFSAHGVRLCSSPKVANQVLHNESEDVVQTQIRYNQKTRQYFINAVVKCDRTKPDKSGKKIVAAVDLGINPLYTVYTSEGKTLTEDKDDRKMIFKMKDDIEKLETRIRKREYKPTNGRTKKQYAGTTKRLKLKLERMRVKLKNFRTMWQHKEAKKIVDAGDVIIWNSLRMQQILKDSKSEYKKLNPTARRNASVAAPGMLTEKMMWQVRKTEGKKFVTGEGEKGTSKTCSKCGWWKPGLRGDKTYVCENPECLYEGNRDVLGARNNLLEKLQQIWGGFVGWFQDHVLQN

SEQ ID NO: 747 - protein, 354 aa, synthetic construct
  REGION 1..354: note = Synthetic
ASVGFALITYKKENKYNELWSKCFNTNFRVFKKGTKYRFNFMIKTDGVSCCVLFVKTDEMGNPLSKTWQNKKCCQEENIDYVEKNPITKELQSMKVVCADPNMSDLIYCGSKNIDGKLETFRYTQNQRRLETRTKQYSKIIDKVNKETIIDNQTIKEIEAELSALNSKSCDYNKFEIYCMEKNKMNSKLNSHYQQFFFRKFKLNAFTNMQKSENKMVKNFGKKFGNPEETIYVMGDYDKGNFHMKGKEPTICKKFRRIFRNAGYKTFLVNEFRTSKLCNGCHNDLEMFMERATNKPKRKGEKEMCHGLLRCQSVKQCCEVIHNRDKNAVQNMLNIVNSVMNTGKRPEVFCRSIL

SEQ ID NO: 748 - protein, 313 aa, synthetic construct
  REGION 1..313: note = Synthetic
MIRTDGISVSILFIRTDNQGMPLKYYNPNNKPIDNTKYIEKEIITDELRSKKIVCVDPGCSDLIYCGSKDDDGNLETFRYTQNQRRLETRTKKYNKIIEEVNNTTFINGKNIKEIESVLSSHNKRTCNYEKFKNYFIEKNKLNLLLFSHYEKTFFRKFKLNTYINTQKSESKMIKNFTKKFGDPNDVLFIMGDYDKGSSNICGIEPTICKKFRRIFKNAGFRTYLVNEFRTSKICNCCNCEISPFMIRQSHKPNDIKVNKKITINGLLSHQEDKQKCEIIHNRDKNAVKNMLNIVKSIFTIGRRPDIFTRIHT

SEQ ID NO: 749 - protein, 661 aa, synthetic construct
  REGION 1..661: note = Synthetic
NFDFMKTNKDNIANIIKDSNTLITINDLVNRVNKIVIHAYQFLKLYLIHLYDNNKSFPIIDKEYICNIFKAITIRKCGSGGYTKNNMHQQLKELYEFHNQHYSKTIVKDDILYYDKLSYILAYEAIDMITNINNNIQEHYIDHLNKYVNIVFNVKEKRNEITKNNKDKDKRKELNKELYDKFNKVKKDLMTFGESTSDVEYHSWIKQQRNKLYPNKVKFDKDSIHYDLKSNTQDYLISMFYISTELEKINNNELKDNPDAKQIRLFNVLPLRTNIIAKNICIDTCGLISNFLGDESTSEHLKNYKKDNNQYNLWNRFFKLNNKVFNKNKYLFNNMIKTDGVSCSILFIRKDANGEPLKKTLLNRNNFENNDTEYIERIKITDEIKRMKIVCADPGYSDLIYCGSKDSDGNLETFRYTQSQRRLETRVDKYNKIINDINTKSMIDDKSIKEHEVILSKYNSKTCNYDKFKDYLIEKNKLNYNLYQHYEQKIFRKLKLNRFINTQKSESKMIKNFSNKFGKPDETMFILGDYDKGNHNMKGKEPAICKRFRKIFKNAGYKTYLINEFRTSKLCNECNSELEMFLEKPYKNGKKLCHGLLRCQSIKPQCEIIHNRDKNAVQNMLKIVESVMKIGKRPDKFCRKEQPTNSAIGNTQIFIPAQNVD

SEQ ID NO: 750 - protein, 675 aa, synthetic construct
  REGION 1..675: note = Synthetic
KLELMIVNKTPLKNIVKTNDLNDKINEVVYKVNKIVIQTCQFLNLYLIYLFDNNMEFPDIDEKFIKTIFNIITIKVDGRGKKSSEDTEKQIKILKDFYTKHYKECIVNSDIINIDKLSYILAYEAIDIVKNIKNNITEHFKDYVNKFVNQSFDIKSVNQDLRNMNFDKDETKRYINETYAELRLVKKDLLKPKSINNFESDEIFNDWLKLHKPNIIRKNKFDKDSIDYDLCSNSLGYLKSLFYMNKELEKINEERIKKNEKQFKLFKVIPQRTNIKPNYITLDTCSLINLTITENFKKYLDKVEDSQEDLWDKNFRTNKKEFKRNNYEFNYMIKTDGIGCSVLLVKLKKGKPVYITSKMQREVKTKLENLDKYIEDVEITKEMKNKRIVCLDPNLSDIYYAVSKNIKEKVIVDENNKFKVIDDEEIITFRYTQNQRRLETRNKKYNKLQDSINKETKINKRTVKEIESELSNYNSKTTNYSNFIEYCKKKNEINRLLFAHYSQKLFRKLKFNRYTNTQKSESKMIKNFSNKFGKPNECTVILGDYDKGEHNMKGKEPIINRRIRKIFRNNGYEVYMINEFRTSKLCNKCESNCDTFHKRESEKPKDLDKKTGKKKIIEVWGLTLCSNNKCSQIHNRDKNSALNMYKIVKSIYGGEGRPKKYCRDIKEIIPVNDRI

SEQ ID NO: 751 - protein, 334 aa, synthetic construct
  REGION 1..334: note = Synthetic
VFCFIGKIKNGKPTYITFKMQKNVKTKLESLDKYIEDVEITKEIKNKRIVCLDPNLSDIYYAVSKNIKEKVIVDENNKFKVIEDEEIITFRYTQNQRRLETRNKKYNKLQDSINKETKINKRTVKEIESELSNYNSKTTNYSNFIEYCKKKNEVNRLLFAHYSQKIFRKLKFNRYTNTQKSESKMIKNFSDKFGKPDECTVILGDYDKGEHNMKGKEPIINKRIRKIFRNNGYELYMINEFRTSKLCNKCESNCDTFHKRESEKPKDLDKKTGKKKIIEVWGLTLCSNNKCSQIHNRDKNSALNMYKIVESIYRGEGRPKKYCREIKLNRFIPV

SEQ ID NO: 752 - protein, 704 aa, synthetic construct
  REGION 1..704: note = Synthetic
ISSKYLSFKNNIKNICEDNVINILQDMSIRTTTIIRNTNYFIRYYYVYLFENNMEFPIIDHKMIRDIFSLVSTMKRTYKEPACNILLKEFYDDVFCNLNLELVSRDKLTQLLTYETERMLVNIETNIKEHFLAHYNRYIKVVFNYYKKDEKIRKKYKCNKKFNIEIKKLNNDYNDIKYNILNVHDDILEDHYDFILEQRQKLFPNIDSIRNNVLYDVKCTPLKYLYTYFTIVDTFEKLNVNYNMEESIKYHNNKSNNNNIVIRGYNTDHENKICKVPIFKSTKNKESTLYKKIKLFSVTPLQTSLIPKYITIDSAVIIQNFGDIIKEKIKEDKTKKEKLFTDPRIINVESLRLYYNNDQTKKELWSLIFDMDDKYFKQKGNYKFNYTLSTDCFACTAPFYHKDTKTVKKGRNMTIKSKSNTDPEYVEDKIMNFSLDLDKKIVCIDPNKRDILYCGTFEDQNDPSTFKKFRYTACQRKLELKTKHYSKIRANSAEIKTKQLESLKVIDKNTINLMCIKKYIIGSGKINKLLKYEYEKPIHRKLKWYSYLNKQKSENKMIKNFKKKMGPYQKTIVVVGDHSCNSSNMPGTIPTISKRIISIFKKAQYETYLINEYNTSKICNKCGCETETFMKRTSPKPKLKKKNIQITVHGLLRCKSVKHTCEALHNRDTNAVLNMLKIVNMTKEKLIRPLLYCQPTAYYATNLS

SEQ ID NO: 753 - protein, 701 aa, synthetic construct
  REGION 1..701: note = Synthetic
KSYITCTKDNIKNIVDNPVLEDCFIGYTSKKKKKKSKTVLFEILEDAVIRTNKIMFHVYNFLKIYLLYKYKKSGIGDLEVKLNVQFIRKIINIIAVKSEKRGKKITKDKETKDMTTFYKEKYKPFLNDSDYLNKDSLNYILNYEATAVITNITTNIKKHYVSHLRTYIWIKFGFRDKIRKIDSLTYKTAGIEKNCKDKEQRLKSIKREKKKILNKIFNTIMDDIVYVREPSNFVSLEKYHTDIEISIGDFVPSKRFYKRDDNGNTNIAWDIQENPLDYLNKMITLNLAFEELNQSIIDSHNDPNTHPPIIKTFNALPLKTSLIPSYITIDTAGLISLFTKKDKKQHLKNLADKKTKEKLWGRIFDLDVKSFSRKGYTFHYMLKTDGVGVSILMIKTDKKGNPIKEPSKKDLREERKEIYDTPYINDIQMTKELLKRNIVAADPGDGDLLTFAKEIPKEKCLTTFEKKFHIGEEKKYANHVHYSYTQGQRNHDIRKNKYIEIREDLKDLKIDKTSIRKIESPLCEYDSKTCNYEKFKSYLGEKISISRKLWDHYKEYIYRKLKLNTYINTKRSESNMINKFKSKMGNPEDILLVIGDYSRGQGVRGRAPSKGKSFRKLFRDNDYKVCLIDEYNTSALCSHCHSKNEHFLEVERNGKKIKLWKLLKCTNCKVIHNRDHNAAKNMLTLSKLIMAKKSLPKPFQR

SEQ ID NO: 754 - protein, 645 aa, synthetic construct
  REGION 1..645: note = Synthetic
DRPFLSCIKNSLKTITKDVNGFQQVVFDSVERTSKIVSQIYFFLKLYMIHLDNIGCDFPKINEQLIRDITNLITSKNETKGKKPSVNILLEHFYNGFFKNLLKKEDIVCRDKLKYILNYEEKDIIKNIETNIKEHYIKHLIFFLKVKFGVFKVIDRINNNKDLAKDEKKKRRAYVYHQLNCIIHDIVSKPLTQFKSRDKFHDSILFLREFLIPKKDKYVKDNIAYDVKMYPQDYLKSMFRINSLLEDINDKIISKHTDPTTNPPLYKLFNPIPLRKSFIPKYITIDTPTLIGFQITKGLSKYITKTGQSAVQKLIWSQYFKTNTKHFKRNGYTFNHIIKTDGVGVSIVFHKIDINGNKVKIPPKYVLNNMTFEAKIPYIENTIINNDLLNKEIVVCDPGKNDLGNFMKKDIDGNPVYFKYTQKERNHHTKKRKYQSIEQQLSQTVFNGKTVKEIESELCDYSSKSSDFDRFQDYVVAKLKINRLLQNHYKKFIYRKLNWNRFINRNRNEDITLNKFQNRMGTPSEVSVVFGDWSDKEGFKGREPSISKRLKRLFVKRGYKCFLINEYNTSKLCSHCHNETSSLVVNGQDIWKLKECKTCGSIHDRDHNATKNMMFIVDELLEGRQRPVIFKKPVIELNPPLICEV

SEQ ID NO: 755 - protein, 709 aa, synthetic construct
  REGION 1..709: note = Synthetic
INIVVCKNKLSNIIKKKPNSVVKAEYEKFNQKDILEVINDTVIRTNKIVFHTYNFLKLYILHLHDKNITFPIINQDFVYTIMNIVSRRTEKAGRKPGAAKLEVIENLTLFYNEFYVQLIIQDDIMTDDKLSYILKNYESVDIVKNIDNNIKEHFIDHVRRYVNLLFKVKEKKQKIIDNASLTSIQKKEKVKKINERYNNIKYDILSSDSEYKSDEKFINKIQKIRKLILPYYDFIKESIFYDIKVNPQNYLKSMIILNKLIQDLNDERETNHKLFQVLPLRTSMVPKYITLDTAAIIQLFIGKAEYFKKISDLSNTIWGSVFNLEDKSFKRSGHKFIHMIKTDGVACSILLEKLTKLEKKIPKTYTTKVFKDHIDHRLATEEEKEMLRQDSENVSGKKIKRKIHNKEKDEVKKYNYEYIEEAKLSDEQKKKNFVFIDPGHNDLIKCLLGKNDDVMNKKKKRSKDVTFRYTREQRNREIKKERSRKISYRVKGEDIMYRETEMSNYNSKTCDFKKFRKYLKEKIKLNRQLCAHYETEIYRKLKFNTYTNTRKSESRMINNFKEKMGNPEETMIIFGDYDKQQTMKGSEPHISQRLKKIFVQNGYKLFLINEHNTSKLCNKCSCVTENVIKQNKKIWKLLRCTSGKCLTYHDRDMNAVRNMKKIVRSVMRGLGRPKEYSPQKEVPAECLSVRKPKIFMTIRNSTRFDNDSS

SEQ ID NO: 756 - protein, 680 aa, synthetic construct
  REGION 1..680: note = Synthetic
NKYVKAVKNTMENIYNDDMTKLSKIKIEDAIKRVSKIDFHTYNFLSFYFMHLDNNNLDFPYIDDDFIRNIMVTVTKRSDNRGTGCRKDSTKEQIVIFKKFYDNHYKSLLIDNDIPLYDNLTQILLYEAADIVKNIENNIKQHYIQHVRKLVDAYFDVKQKINEIKYDKTLSHKKKNAQMKEIRDTYNPIKNDILNPLPFNKMTPTSKKEFHEWITNIKPKITPNKKSYLKDSMAYDVMAHPQDYLKAMFGINKELSDINKTIDKENNQNKDNQRPLETLFRVLPLRTSIIPRHITIDSFALVMLLVRDRKQDYLKHITEKSDEIWSLMFDLKNPIFKKKGYAFHHMIKTDGVSCSIIFVKLDPKGNPYNLRTMFKKNLQEDSNGIPYIENAEITNQMKNKTLVGIDPNHGNLISCKSKSKETDHKITATDAKENTIVYEHKESKDFRYTRAQRNVETRSKKYNKIREKIKSETKITTAMKASKPTKIKTVEEIETELSQFNSKDANKVAFRSYLKGKIITNRLLYKHYGQPLYRKLKMNVYINTQKSESKMIRNFKHMFGPPERVLIVFGDYDKTETMRGCEPHISKRMKRLFMINGYELYHINEYNTSKLCNKCGHENEQFMYHKKKLLWGLLRCTNEMCKTIHNRDHNSSRNMIKITESIFAGKGRPKEYTRIINKLP

SEQ ID NO: 757 - protein, 727 aa, synthetic construct
  REGION 1..727: note = Synthetic
TDNKTSNPVEENMTVINKLSVFYEDHYKCFLSEKISRSGILAVLDSQIEQYATNLSNIIHTHYWMRLKQCLNLEFKISEKREKIDLQHTDVNERRELKSKLTRQTNTIQDSLLINDFNISDKEIKGTFDIDETKMRALSDKFKIPVFSEFKVRDIEEKKYLYNLKKERKERPKYVIKQEEKIENLENKINKKANEPLKNKTPKGRESEYLRKEKELIELRVKLEGEKEYLKLLEEKAGLKVVKDLVIKDDIYNYKWQFDNNPTLYLQSFFKLNNYLSSNNDEKGKFHTVPLCTSAIPPYVTLTTSSLLDIFGNMQGNINDKVDYIIWRKYFHLFKGDTIDSKNKSALRKEFRRKNYHFHYITTDGVGATILFRHDRFLSGYVPMKATVNKTGKPKTSIDDTPYLRDINSSIYCHHNKVAIDPNKMDVLYCTDGKLDLKNNKKVNTFRYTKPQIDFETKRKRYEEVRNIAKDKSGISLIESKLSNVNPKSTKYDIFRTYVEVKVNTFTEELLSHYRYNRKLNEKVDNSKASYRKMRMNVKINTERSEAKMLNNFEKKFGNKNEAIVCFGDYSQNHLRGTAPVKGKGLRKFFKERGYNVFLISERNTSKLCHSCHGVLEKFHRKGDRKRKKTDYKVRSYYETVSYVHGVLRCKNCNERGDLYNTGCFEYLKSVEINNFINKKTWVDGNMYKIWNRDLNASLNILMKAKYEIFKYWIPDANFHQTFNSIF

SEQ ID NO: 758 - protein, 693 aa, synthetic construct
  REGION 1..693: note = Synthetic
VKFLPVKICRSGIRSILDSQLDLYLTNINNNIHAQYWNRLKEYINIKKNVKENKRIIDSDPNKLPKDKIKEKGDITRVTTALQFDLLTNNNNSNDPDYASIFQTAKIPNLSEYKEVDLPIKIEILKKKGYPKILEELYDDFTLHRQMLNNEQPPDDRLNLLIKCVNDKEINYNNNREKIRLEVEKERIYLEQSYNYNHQFSRNPTLYLQSLFRINNLLKEDEVGKFHSLPLFKSAIPPYITLTTSSVEKLFTENNLSNGEIKDKNKDKTKENKSISDYDKWRKHFHLFKNDTIENKQGTELRKQFRRKGYHFHYILTDGVGATILFENNKISNKKNESKTKYVDKAGCPSNEKEDTPYLSDENIDASVYDGLNVVAIDPNKVDVLYCTDGHTDTYKNRINPASNDIRKKKINTFRYTKPQINHESGKRKYENIINDAKKVSKINDIESELSHTHPKSNNYKVFVEYLEVKIRTLSEKLLNHYRYDKPPNVIAEVDDASYRKMRLNYKMNLDRSESNMLNNFKKKFGDVNETIVCFGNYGQGHLKGAEPVKGKEYRRLFKKRGYKVFLIDEFKTSKLCHSCHGELKYFHKKSDRKKKENAEDVEDERDAYVHGVLRCKNCYNMESMNIAERFGKLMSIKKNENPKIWKDGKKYKVWNRDLNASLNILMKAKYEILKKDTNIIFPEIFSRKILDV

SEQ ID NO: 759 - protein, 668 aa, synthetic construct
  REGION 1..668: note = Synthetic
SGNLSKQEKINLKSKITINTKLFVYSLLDNEKNNDLDDFYNNDYDLIMDKLKIPILKNIETNDIKNEYDKLINDYNEIIQMENNKITDKQNNKTDKQNNDYYDLKINLNKITEKYEKDSKNFNEKYELFKNNIKNTKYNYNYLIKSNPTIYLQSFFNINNYLKSDLTGKFNCFPLYKNSINNYITITTSSLINLFTFSKLKNKYVNDINDKKEVNEKQKIFTKNKKIFEKSVTKDKYIIWREYFNIYKDDNINFKGENKLNYNDLKKLFRVNGYKFHYIKTDGVGVSLVFEKLDYKKSSTNKKSSTNKKSSTNKKSSTIKNDNDKNDNDKDIELDTNEIDTPYLQKIDDYKKYKLIGIDPNKRDVIFCTDGAYSRRSSLKKGRSMENINGKTKFFRYTKPQINHETLKTKYDKIRNKSRKEVGVELLESDLSQTNPKSNNFDIFCNYVDIKNKVYYETYKYYNYIKKPYDQNNIKNVGFLKMKLNTYFNTKRSEENMFKRFENKFLNDENLKPKDVIICYGNYGNGALKGTEPVKGKGMRNLFKQRGYNVFLINEKNTSKLCNHCHSELDKFHLKCHRKRKKGDNTEYSDVEKKSKVHGVLRCKSCKDKGPIKSLIFSNKQFSVMELNKSWNDNKYYRVWNRDLNASLNILIKAKHIIQGLNIPESFN

SEQ ID NO: 760 - protein, 760 aa, synthetic construct
  REGION 1..760: note = Synthetic
NKPPTTTVKTSLKNILKPTKYVGGFDINRIIQNHVRYINNITTHTYFFLKLMLIYYIEMNLEFPKIDDDFIVCIMKSITEKVKGGGVRPSIETINTNNKIIDFYDKCYRQLIPDGEIRIESTNLSQFFKYESTTITTCIKNNIISQFSNRLSQYINLKLDIENKLNNIKNNKEYNQEHKDVLKKSIIKTCRDVKNDIFNKDKLMVCDEEYRDFVFDIRSTLLPTRVYTKNLQYDVTSHPMDYLRSLIILNKKLEEYGKSFHAVPTRKSYYPKYVRFDTCSIIYLMISSENRKKMLGNVKLCKDEVWNQIFNMENKSIKSKLKHYRISGSLVTDGVGASITFIRRDLEDIVDTDNVLSIDNPNEYLNIKSSQWGEYECQRNMYKENLRANDIKVKSSVDQVDKEKVMYYNGLKEDKYISECKNIPGDTKVIAIDPNKGNLIYAIDENNKVFKYTNARRRVESKTVKYTNLRLQFKRENAQFGVSIEGWETLLSALDSKSCNFEKCRQYVNAKLYSFLHLRDLYSKLPNGSSSNISDLSIRKLNLNRYMNVKRSEDLMLNKFQEFYSDGDNMLNPKNTIIAIGDYSPGNYHIKYKNPAMSVRTRKLFKNRGYNVFLVDEYKTSKTCSKCGECLHKFVRRPVRKKKRRLKKNENIIKINNIQLNEVKKDIKLVEINENVKLNEVEKDIKLNEVKKDVKLVLAHGVLSCNDINGCRTIWNRDMNASLNILKIVKSEILGCGRPEAFKRSKSGSNENMPTHIIST

SEQ ID NO: 761 - protein, 623 aa, synthetic construct
  REGION 1..623: note = Synthetic
DYPDEFPVVDTNFIIIACKVGCSYDPNAGTGYMGKNKVIFDELTNFYNEHYAPLHYIDEKVPYLNLLQIFQYEAKTIETNIKNNIIAQFRIRFCQLLNHHYNVKAELKAAKQAGVKSELVNTANNVKYHFFNHGMDKKKDKPLPDDIRDVVLNYRAYYLPDQKPTKGSVDYDLRKNTLRYLRYLFLINRELEAETGKTFNVFPLKRSFIHGQVTFDTTALGKLFGDLKTATQATSTKHAGTIKKIFWNKYFIFNLKPVANEFNYDNDADYINGLKQHPAIREPYDYYFSGMIKTDGVSVGLLYKRYDVVADDNYGNRKKEINVDTTTGEDIDSDELHITDIVPESAEFQELASKKIVAIDPNKDDIIYCTDGQQNFRYTLNQRDVETKNRRYKKLIEQDKSFRYKIDGESFSVNDMQTAMTKFNSKSSDLETFTNFVATKNSFSSALTGHYNFIKDDSNPDEADRINYRRLRFNVYNNRRRSEDRMVNRFKAKFGHSDQTFIAFGNAGSNHVKGKAVVKHKGMRKLFRRHGYDVLLVDEFRTSKVCYECHKELSNVYVDWNNRQGEVESVYVHGLKRCTTETCKAYKNRDTNASMNILTIAECHFQGRPRPVALCRQKKSSQE

SEQ ID NO: 762 - protein, 624 aa, synthetic construct
  REGION 1..624: note = Synthetic
SLDCYCRKTTLKSITQDHDIVSTLEQLVVNTSHIIRDTYNFVRLYMIHLLSNNEKLPIINKEFMRAVFTLVSNRKRIKGTKADIIYGQLEQFYDEEYKPFQRIKVDAVPKDILEYESTTIITSIENHIKVSLFSYVKKLAFVLTYDDPLQYKKVLTDLLNKDLLSKKKVKKNKTSDRTKTNKKQGECDVFKSNEQYHTVIRHFNPLITNAIKETISVSGKPQLCFPLMYTIASMVEEKRLENDINAKARKLRSCAIIPLRRSLVPKYIRLDNSIFTRVFRVMMKEKKLDIWENIKNEVAKTMKSKEGFMLSSFQTDGVACSLVFKKGNRYVEGTKRPKARFSEKYFEDLGLYDEFKGKRIVAIDPNKGNLVYCFDGKTTLRYTQNERRKASKKTIHKYRRKNKENTIGEGIIKNRLDDLSGFNSRSCSYVGFKDYVGTKNLYNRDFCSLYQDTMFRKNNWHSWINLRRSEDKFANRFKDTYVDKISVDGRDVYDMKNTVVVFGDWEERPSFLRGKEPTKGKGMRSLLRKAGLTVYLLDEFRTSKTCHICNSENESNVISREDPRPWKKGESQLVWGLLRCTNGDCRRIHNRDFNSASNILEISRTIICSGNRPNIFDRSLCCND

SEQ ID NO: 763 - protein, 652 aa, synthetic construct
  REGION 1..652: note = Synthetic
DEFFKCVKVSLKHVLKHHEINQPKINQTAIKAHKIVIHTLQFMKLYLLDYYDKNNNVPNINKEFINSCMKIVCKEKATGRPPKKEIKELKEKLTTFYNLHYKSLCQNEELDYTYMNTILDYLTIDILTMYENNIKQHYIEYVERYVNVVWRKKEMIEFIRRVKKSKKERETSVKQLCNQLRRIKNDLLNIENANYKSNSFYHKWIQEHHTLVVPDKDKFRKNNLYYDLQCNPQDYFSCMVFMMKEVEKNDYSVNNIFPLRNDIIPKHIRLDTTTLVHLLMTKKQGKKSDYLFKGNLKRFEDKIWNFFFRTEKQCFSKKWYSFHHMIETDGVSCSILLLRKDKVGKRIRTNKIPNQEQYIDELKDYSNLQDKTIISIDPNLSDLVYCVDGDTRERNHFRYTQNQRRKETKQKKYQNIILEYKEETIDGKTIIELETETSFYNRKTLNIEEYKKYLKTKNEVNSKLFQFYEKQLFRKLKLNGYWNRLRSEQRMMNRFSKIFGKPTDAIICIGDFEQRKHRKFKEPIKGKGFRTLFRRNGYKVYLVDEFRTSCKCSNCEGGECSKFRKCRNPKPMKNNSILSHGVLMCKTCSALWNRDENSSRNIYKIAYNAIHQNERPTYLSRSKVVSGATSVGKLQCHSFSGKERETAQPQFT

SEQ ID NO: 764 - protein, 387 aa, synthetic construct
  REGION 1..387: note = Synthetic
MTKKQGNKTDYLTKGNLKRYEDKIWEFFFRTERQCFKKKWYSFHHMIETDGVGCSILMLRKDKVGKKVRISKTPKQEEYIDELKNYSKIKDKKIVSIDPNLSDLLYCVDKDTKERNFFRYTQNQRRKETKEKKYKKIILDCKNEKINNKTIIQLETEVSKFNRKTLNIDEYKKYIKKKNEVNSLLFKFYEKRIFRKLKLNGYWNRLKSEQRMINRFKKIFGKPDETIVCVGDWEQRKHRKYKEATKGKGFRTLFRRNGYKVYLVDEFRTSCKCSNCNGGDCIKFRKVRNPKPKKNNQILSHGALMCKTCNALWNRDENSSRNIYKIAYNAINKKERPNYLCRSKKVENDLIVRSDTSSVCRLQCNSLEFTPVEAGGLMKLITQPKFT

SEQ ID NO: 765 - protein, 663 aa, synthetic construct
  REGION 1..663: note = Synthetic
DIDIPVYKTVKHSLRAILKNPEETHERILSAVLTGHKLVQHASQFIKLYFIHCYDHEKPFPVLDTKFVKCVMKTIGVKDTNQGRPPNADTVALMDTLKVFHDAYYAHYLHENITYSSLDNMLTYLADGVVTVLETNIKQHFVEYVERFVNVVMDKKECLENLKTKEEKHEFVSSLRRYKVSLIENRNKELPAQLLHHASFVVPQRPFQKKSLWYDIVCSPQDYLPCMFYMMRFVEAKDQTIYNVFPIRSEIIPKYVPLDTATIAMLLLKDGACVNGISKGYLLKNGNMKANEDAIWASFFRTELRCFRKKHYQFDHRILTDGEGVSILLIRRGHDGKKARVKDNHEAYLDDLTSQERVVYQQKRKVAIDPNMDDIIFCSGESLKGEMEHFRYTRNQRRKETKNKKYRKIHEELKKTTVIEDKTVQQWETELSKHNKKTLSFDRFLAYVKDKNAITQKLMAFYQQRIFRQLKWYGFINRQKTEARMVRRFRSIYGAPSETVIYIGDWEQYKYRKYKEPSIGKGIRNVFRKAGYQVMLVDEFRTSCRCYKCHGLCETFRKCPNPKPWKCEETTTRHGLLMCQTCSGLWNRDVNSSLNILRIVEDTLAEKGRPEYLQREKKQDGGATSATGGEKSPVKQGRKPSLSHTPKLSRGCEASTLRVQNLH

SEQ ID NO: 766 - protein, 648 aa, synthetic construct
  REGION 1..648: note = Synthetic
PIFQTVKTSLKSIIRNDRQQQDEVVRKIALATKMTSRIMTHTLLFLKLYFLYTFDNENEWPELNERFVEQVMKTLCAGRNARGRRPNEDTVALKTALDTFYEDHYRPQMVEEDALSYENLCQSLKYMSIEVITMYKNNIIQHFVSYIERYINFTQNKSTRITDIKQNANLEPAQRTEQIRALTQELRNVKHDILTKAADPEKKSNGNLHAWINEQIGSILPDHQVRENNISCDLEDSPLDYLKCMIFMMKHIEVQDEDCKLLNVFPQRSTLIPAHFRLDTTLLISLISTDKTALDKRVGELKERKDAAWASEFKTELKIFGLNETKEQGYTFHHQIETDGVSASILLIRKDKAQLKKPKSKSKKGVKEPYITDLDTPAKRMKVADKVLVGIDPNMSDLLFCVDSDNSNQRKLRYTQDTRRRETYLSKKQKILEKKKEVTKIDGISVKHLESNLGEFNKKTLNFNKFKIYLSAKNRLNARLAPFYDKNCFRRLKLGSFIRRQVTEARFLNKFKVKFHVDHKPEDVVVCLGDWEQYKHRKFKEPVKGKGFRTMFRRAGYHVFLVDEYRTSCKCSYCSDADAVCETFRRVKNPKPNTTGQILCHGLVRCRTCSRLWNRDVNAASNIWKIAKEAIGGRQRSEYLARGGNRNH

SEQ ID NO: 767 - protein, 686 aa, synthetic construct
  REGION 1..686: note = Synthetic
QEPHYHVVKTNLANIVTLHTDPCIIVDAVERVHKLAVHTLHFSKLYFMHLLDTGQESPKINGQLFTTIAKVIAENSRCVSNSRVSEATGQLKAKLLDFHIKHYRDTMVSEPLSTLHLGTPLDYVGVHMATVYENNVTLHYYDHLTLFLQSMYPVSPSASKEEKSAVNWLIRQRRKFVMNGAGLYLYVPETKADVEQKETVDPEPLPENDPLLWHIEYLLPNRPIAKGTVNYDMKMPGRWQDYLGCMVYMMKYVESLGHKIYQVFPLRSEMIPKHIRLDTSSIVDLLLSRDATKSIGSKKYHHKHLTEKKDFLWERFFKTDMRYFCPPHLSGPWRFDHQIETDGVSVSILCISKTSGKLASQLSPEEFKFAPKQAHRQSPTVYLDQLQDKSKLQGLKVVGIDPGKSDLLYCASATGERTADTFRYSQKQRNAERKSKKFKRKRENLIKTTLVEGKSVEQWLAELNQFNKKTLDFEAFKAYLAKKNELNFKLFGFYARPVFRKLKWYEHINQQRSEAKMLNRFEKKFGPPEETLVVFGDWCESGHMKYSEPTKGKGFRQLFRRRGYYEWLVNEYGTSKQCYNCQHSKGVNKKFLYVDKRKPWKSELENALSEMDEDSKQVLCHGLLRCESCKMPWNRDLNAALNIQRAALASLAGERRPAYLCRPQKEKNNDDAYTFGGEETCILAHK

SEQ ID NO: 768 - protein, 674 aa, synthetic construct
  REGION 1..674: note = Synthetic
PKAEYHVVKDSLKNILRNPDDQAVILDAVLRAHKINIHTCQFIKLYFLQLLSTGQPLPKITEAFVTNIAKIISSESMNNKNRTNRSAQNEATVALNQTLRPWHIQHYKPTIMQDDKISLLGLSTPLGYMTRRIVTDLETNITEHYYDYLCRFLQAVYLPWTPRKTKNPFQYDHKVWAKHLSKLRKLIMNGQGASIVDEHLSAEQIRNLVPMRDLQENKVGYDIKCSPQDYIRPMYYMMQAVEGAEMKLFNLFPMRSSIVPKNIRFCTSSLVDLLVKPQHGLGTQRSLKSNITKHKPRIWNALFKSYKRSFCPERLNGPYAFDHQIETDGVSCSIVSKLKNNGRFEAVKNPFGDTYIDNCYETESLQKMNVVGIDPGKSDLIYCALPIGEKKDRAATQFRYTQDQRRHECKTKKFMRKQESMKKAMIEDKTVKQWEHELRFFNRKTLAFEAFKFYCQKKNQINARLQGFYAKLRFRQLKWYAKINRQRSEDNLINAFKTKFGSPLETIVAMGDWCEDKPRKSFEPTKGKSFRKMFKKAGYKTFLVNEFRTSCRCYNCGEEVAQHFLEVKNPRLEKKTKQCEFDPPCEGCQKAQVYVGKPYKQTVKCHGLLRCDSCETYWNRDLNGALNIRLAAVHAINGLERPLHLQRPPKNATTNITEPNSYGATGVTPSVFTS

SEQ ID NO: 769 - protein, 628 aa, synthetic construct
  REGION 1..628: note = Synthetic
PPEQLRVVKTNLAKIIRDVNNLQIIYRAVEDLHKIAIHTLNFLKLFLLHHLHANQDQPPPVVTSALLQNIAKVIYEDNADKAQAQHAAAATHTLKAQLLAFHTTHYKPTMQPEVLNLQHLWSTLIYMCNGMKATFETNISEHYKDYLVCFLMVLYRQDHPRASKRAIKTQARSAAHLIMSMKFHKIGDMDSAHEHLRKLYPKREIAKQSLYYDLACDDGRVQDYLPCMFYMMQFVEAAGARMYNLFPLRSNIIPKHITVDSDFLRRLFDTKELGTKASLMKVGEHGFRLWAAFFKTELPCFCPLKTKDGQRNRATAWEFHHMIQTDGVSCSIVHRMKAERVTRDKPKLYKTPYVERMADRERFHSLRVVGIDPGKSDLLYCAMPMPQKKAKTMRYTQSQRKAEGKWKKFERKRTRLKNTIIEGKTVADWELELSVLNRKTVDFNRFKHYLVEKNRLNQRLLTFYADFIFRKMGWWSKINIQRSESQLINRFKETFGAPHETLVAFGDWSEKDHMRNHEPTKGKGFRKLFAKAGYDVVLVDEYKTSASCYNCHGENAKFKEVANPRPRRPNQEHYRATILCHGLLRCNACKTLWNRDRCGALNIELIAWNAVQGLDRPLYLSRHTPLGG

SEQ ID NO: 770 - protein, 637 aa, synthetic construct
  REGION 1..637: note = Synthetic
SLNIYKTIKTSLKSIIQDKTDKNTLELAILNINQIIIHTYQFLKLYCIHIYDTTTKLPNINGQLINMIMKVLCIREGKSNSGKKLNADKLILKNDLKTFYTDYYSKTLSGPLKLSYTNLNTVLDYETVDIITNINNHIKEHFITFLNRYINVSVNKQINETYIKTFIPKELQKISLKYYRKEIGLIKTDILNDENKCNIKYNLLKTKLRTILLPNNLSKNIYRDINDNPLNYLQCMIKMSREIENKGEALFGCFPLKSSLAPKYIKLDTTTIIHLLLPKHLNKTYYLTNGNTKLLQDDIWNMLFKTNKKVFKDKKYTFNNSILTDGIGCSLLFIRNDKYDPLKVVKIHSIQKPFNYREFKYVDELTSEEKESIKNLHLVGIDPGKIRLISATDGIDKGIDKHKMNLFTYSHNQRKHETKVNKYKHIIEYLRKQSTINNLSIEEIESSLSIYSSKTCIFSKCIDSITTKNKINTLIHEFYEKEIFRKLKWYSYINKQCSENKMINNFQKIFGDPKDTVLLYGDFSENSPMKNCEPTKGKSMRKLFKRHGYKVYLVNEYNTSKKDFLTGKDTETFLERTDKNNNKRLVHGLLRLKGVPNNKSCNSILLNRDLNGSMNILIKGKCILNNINIPKYLRRSH

SEQ ID NO: 771 - protein, 639 aa, synthetic construct
  REGION 1..639: note = Synthetic
SLTNYKSVKTSLNSIIKNKENIVEINKIVIVVNKLITHTYIFLKLYCIYMYDKNKEQIPVINVKLIKSIIKIIGSKDNRGTKPSKTTQLLMKDLQDFYDKEYKQLLNNNDKLSFTHLNTLLDYEAVDIITNIENHIKEHYTDFLFRYINVKLNKKNMEKQIKEDFSNVKLRKRTLTGYRKILRQFKNDLINQTNKCQLFNDLRQYIIKNIFPENITTESIQKQIETNPYLFVNGMIKMNREIEKLGNTTFNCFPIRRSCIPKYIRLDTTSLIHILFPKELNKNQYLTKGNTKIYQSVIWSMFFRTERKVFKDKSYTFNNSIVTDGFGCSILFIKNSLYNPLKRVKPKVYRKPFNYSSDKYLDTLTIEEKETYDSKCIIAIDPGKEDLIYATNGYKNDKGKLITFRYSQNQRRKEIKSKKYMKMLDAIKLTRKVNDKTIKEIESSLTGYDSKTSVYELFKSYIKKKNEVNELLYKYYEEELHRKLKWYSYINKQKSESWMINNFKQKFGDEKNTVICIGDYSQQYNMKHKEPTKGKSIRKLFKRAGYKLFLINEYNTSKKSFIDGSDMEKFRIRSNPKPWLKYQLKQVHGLLRSKNVTENNNNPKHILVNRDMNGSMNILKKAICIMYNIPIPDYLCKTN

SEQ ID NO: 772 - protein, 379 aa, synthetic construct
  REGION 1..379: note = Synthetic
LDTTTIIHLLFEKEHGNKGDYLTKGKVVEKREEIWKNFFRIEKKKIFGNKDTSYKFNYQVHTDGIGASILKIRSDLYNINGKSVVHSIRKPKGFKQERYIDELTEAEKEKYNKFDIVGIDPNLSDLIYSTNGKTKNVKGKHKTTTFRYTQDQRRKETKDKKYLKIIDSLKKDTKIKNASVKELEAILSKFDSKSCSYTNNCSYIKTKNKINSILYSFYEKSLFRKLKLNGYINRQKSESKMINSFRTTYGNPSKVLVAFGDFEQRQHMKYKEPVKGKGMRKIFSKAGYTIFLVDEYNTSCKCYFNGVDMEKFRKRGNPRPWKDNITTYHGLLRSKNVPNDKSNMIYIMNRDFNASMNIRYKAFCYINNKELPSYLTRKK

SEQ ID NO: 773 - protein, 589 aa, synthetic construct
  REGION 1..589: note = Synthetic
KVDRTLTELILKVVSTVGKSRKFSANEALMSQLQELYRRDFQPLLPPGDAPPSRSGLKQVMKYEAVKMVAVFETHLKCHYPDYVKDACAVVYQRRVMREQYKGKKFVPFERKFRDLLHDVLTVDGRAWKSDPVDHDGVHYLRSLALPAGKTFEKQNLQYDLKANPQDYFSVLEGMTALTENTEERPSLRNLWPLRTTLVPRYIRIDTMVLVELLVPPSERKQFTSKVKASAFEVWQRFFHLDAKVFRGKKFHHMLETDGVATSVLFEWENVPVVKKSKSKNAVPTESYLDELPPATLQSLRSRKVVSIDPGMSDLLSCISEVSTTTTPEKLRYTQNQRRFDLKTVSRRRQLQYEKDHTIIAGKTVTTHETELSAYNHKTVNIKKFKQYLRAKFLFNSQLAPFYRHYHFRKDRFNTFIDTQKSERAFLNKFRRTFGTPTDTVVAFGDWEQRQHRKYKEPTKGKGFRQMLRRDGYDVFLVDEHKSSVQCSSCCSPSARCHKFRRRLDPNTSKPQEQRHRRDVHGLLVCNTCSRLWNRDVNAPLNMNTLTRACLEGRPRPFYLQRGNTFSTVSTILPTVQGICKDVKIHIRW

SEQ ID NO: 774 - protein, 599 aa, synthetic construct
  REGION 1..599: note = Synthetic
TVSVKGDKRGSKASINNQTIIDDLQAFHTEHYKPLMKEKEVLSYTGLIQMLEYEAEQILTCFENHIQEHFEDMVNRFVNIIFYQDSKIREGSEQDQKRLFRSELAKIKKSIMNSSGKIENDDPTYEIIVDLVNNQLLKGVAINKSLAYMTQSDSLALLPIAIRMSKCGEIIMRGRYESLFKIMDYKNLLQISMKGTKAINVFPLRKSVIPKYIDIDTFLIASNLIGKGNTEYFYNNNLVLKAKEIWGKIFKTNISVFRKKGYKFSRMISTDGIGCTILFIRSDLYKETKKSMVHSIKKPKGYKEDIYVDDLTQEQKIEILKKKKVGIDPGKNTLITCVDGKIETIEKDNGKEYRKVNNMVFTNKQNRSILKCSKNGKKIEKDKKTSIMEEKSVKERETSLSEYNSATCNLDRFKEYLKVKNEENEYLIEYYQKDMYRKLKLETYGNQQKMKEELIKKFANKFGSKDEVVILMGNWSETKQMKNLDPSKGKGIRRIFKRYGYELYLVDEYKTSCRLYETGEELLNVRGKHELLGSKIYNKVDMDKDNLNKEVEIFIAESGRRPTIINRDINGALNIRLKGIKILEGGEVPEYMQRNNNED

SEQ ID NO: 775 - protein, 666 aa, synthetic construct
  REGION 1..666: note = Synthetic
IKIKLSSISSDVIKNKIKKYVDLENYLTSVTTLFIKGYVLNCKTIPFINLNFISTAYNVIIENHNQFGNSTFKKKGKPISTNKDLFETMNTYYKNKFSKIATLNNDYTFKNMSHIIRSSATQLLICYRNNVLLNYVTYINKFVNYNLKDYKLEGDEKKQQLKELKQVKSDIINNTLISKSKYHLWIKKNKSKIIPDLKDGEELFKLLHSRNDSLKLHPYMMFMNNYFEKNKKKTLQQFPLRKEIGNKHILIGTDMLIETFLDNDFDYQALDFSNTCFKEIKKKCDIGKCGKIVRKLQNKEDKNSKEEIYLSYLENEYLKIKTEIWKCLFNFKSKHLNNKTYTFNNSICTDGYSVSIHQISKNEGKIKKAVFDDNFKYLDELTKNEKKILSDQIIIGVDPGKKNLFQMIDQEGNKFRYTSIERRRELQIEQLNHKLNKFLPKSNFTDSSKSNNPTIFNEYIKNKTKQLCTNLIQYSKDIIKNISFNRYVFVKKTEDKMINNIKEKFQNTKDKKNKDIVLCYGNWSFTKQMRYFYPTPGIGLKKRLSKEFKIYNIDEYNTSKKCFSCGSNNEKFLKIKDPDYNKKRIKRVKWEKFVEERENKDILNKKIKPVFEKKLCHSLLCCQNKNCNKIWSRDINASLNILKIGVELLKNNERPKELQRTQVEGY

SEQ ID NO: 776 - protein, 516 aa, synthetic construct
  REGION 1..516: note = Synthetic
IGIIPSYSKSAQEYFKLLKKYNEDVKLKKDNLKKPIHPYYLEMSKSPEKFLLCMLKMSNELEQTNKSQLQVLPMRSGFVPKYITLDTSSLVSLLYETPKENIKITKQRTVKQNKNNSLKTTKINKPLTPKQETRAKLAKLLEEEKAKKMKEREIQLKFQEDNKSQFQNKSEMLNNLTFNAPKIWGQIFKFNKNKIKTNRKHYIFDYLIKTDGISTTLQFKIKSENDYAIHHNKKIDNIDEVLDEFRYLDKLDKLKLKDLNNKYNIVGVDPGKKNILYMRDFKGEQLRYTSQQRRVECQMKKSNRVIHNEKLKVSHIQNLETELSKYSLKTVDIKKYKQLLQLRYIHTKALRYFYERDIYRKLRWRRFTAGQRSEMKLVNNIKETFGSDAVLLYGNWSRNTQMKYFYPTPNIGLRKRLGVHFKIYMIDEYKTSKTCHECKHENENKIYHKDKRHWKNNQQKLVHGVLCCTNINCNTTWNRDVNGSLNILEIGQAILNGKERPEVFRRTTISQTIQPT

SEQ ID NO: 777 - protein, 742 aa, synthetic construct
  REGION 1..742: note = Synthetic
VHKDRLKNVARNKTVVKKVNEVVNNCNRIYTYTLQFIKLFIISKYDAHVIEELDKSIKDDIDKPIINDPNIMDFEDDIDVLIYNRSNKKKKKKKKKKIKKERGLFTPQFIRYAIQTVTSTIDNRGRVANNDPILDELEEFYNNEFSELVGGYKPLRTNITHILFDAMTVEILTSYKNNVWMHFIQRVKRYINSMYLYNFNKKYYYLLDTKNKKDEEKYETLKKDLMKEVNIIKLAVLGIDISDNTFNNTVLINYRNSIKHLRKTLIPPLKKSLPEDLKIDPYKFVYSMLYMNNEYERLGISSHNMLPLRHSFSPRNILIDTSVIVETFCSENKAALYKDIQINAVDIWKLFLKEKVTRNHPNSKYMFNNVINTNGFTVSIHKADQDRINKKIQSHSHIKGSKQVINKDGIIKDEDEDIIDDEEDNDSNEEDEDNNEEDEIKPTIIPKKKKDDEIPYIHNLDTTTLTGLVNKIKIGGDPGVNNEMTFISEDGKKLILSAAQRRFETKITLNKQKRRDHLEKNPLIKKLIEDFTVNGKTNNYNKFKEYIRTRNILYNQVEKYYQLEFHRRLKWHTYISTQKWEHKLIDTITKFFGTEVNGTYNKDDIVIGIGDWSINQAFKGCMPSKGMGLKRLFKKHFKNTVSVVEKYTSKVCSKCKHNVEYYTKVTESATYKGKNKSYVHGLLCCTNKNCSKLWNRDINAATNILQILLGHIYTHKRPLYYEGTPLKAIRREIIKQGLLINF

SEQ ID NO: 778 - protein, 428 aa, synthetic construct
  REGION 1..428: note = Synthetic
MNNVFEKLEIKQNNMFPLRHSFVPKSIFLDTNCISEILGYETIGEDAIDIWKTFFNKRVTGVEEINNNSYYRFNEQISTNGYDVSIHRADQKAVMKKKTKFGRKIVTPNVVDVKLNVITDINNEVKVEFKINILDIKEEKQRDPPNINAEIKYISDLTKKQLKEIKDAKYTLLGNDPGKNNLITLIDENGKTVTYSSVQQRFETKITLNNKKREDFLNSRPIIKKKIEEFVLCAATTNIDKFKEYIKARHKLYYEVEKFYQEPIHRRLKWHKYISTQKSQHKLIETIKKTYGTKIDGENQYDSSKILIGIGDWNEDKCLKNCMPTKGASLKRLLSHAFKTYLIEERYTTRTCSKCKHETEYYTKVIDQPTFKLDKSYIHGLLCCTNKNCSKLWGRDKNAATNILIILKGHINDGERPPYYDGNYRDLH

SEQ ID NO: 779 - protein, 529 aa, synthetic construct
  REGION 1..529: note = Synthetic
DELQLFSLQHFIPTFNIYERISLFKRTQACDLAATQMLTTYKNNVFMNFFKRLLTTLKVCFPGDVRLKTTVRFTLHKKYITFLCSDPEIPKILPEELILFQDFHSEFMTYLQLHHGKPLHYNIKAHAESYQPLLIWLAHKLEAAGGRPFQLLPLRTTCIPQHLLLDTKCMIDLLGQGGEVGYANSIEGNKSKFWNMYFDVYENRKLRVRGYIFSGTAQTNGFNITLLFTKSTPGMKLKPKIKQKVQQELNLVGCDPNKYDLLYMTDGAHTLRYSKGRRRHEAYGQRSEEIILKERNRQGIVAIENTLSNHNAKTTGLNAYVSYLTKKHIINDQVTDFYENMLFRKMAWRRHVQSEWSDMRLINEIKSTFGACKIGFGNWSGSNKHLKRLLCKNFSLETIDEYNTSAKCHNCLGDTETFLKVPKPRACRQCDTLGKTLCRTNCRWGQVKVHGLLRCKNGCGTLWNRDLNAALNIRRCLEWQENGEMAFRDCGKKRRTINTFSNLTVTELAELGLECLDISDFDIKTLHNV

SEQ ID NO: 780 - protein, 364 aa, synthetic construct
  REGION 1..364: note = Synthetic
MIDLLGQDGEASYVNSIESNKSKFWNRYFDVYENKKLRVRSYVFSGTVQTNGFNVTLLFTKSVSKTKLKPKIKQRVQQELNLVGCDPNKYDLLYMTDGAHTLRYSKGRRQHEAYGQRSEEIILKERNKHGIVAIENTLSNYNAKTTELSAYLSYLTQKHIVNDQVTDFYENMLFRKMAWRRHIQSEWSDTKLVDRIRSTFGACKIGFGNWPGANKHLKDLLCKNFPVETIDERNTSAKCYNCLGDTETFLKAPKPRACHQCKLQGKKLCQTTCRWGQVKVHGLLRCKNGCGTLWNRDLNAALNIRRCLEWQEIGEIALREAFRDCGKKRCIMNAFHNLTVAELKELGLECLDISDLTKETSFDV

SEQ ID NO: 781 - protein, 609 aa, synthetic construct
  REGION 1..609: note = Synthetic
SDSPLKVIKTSLKSICLDKETILTINNYCKNLNLIVIHTYQFLRLFILHKYHQKETLPKIDEKFIEHIIKTIAFGDKRGRKFVNEELAIFYETHYKPTLSKEEKLSYSKYGNTIGYTATAILTCLETNIKTHFTKHLRRFINIQFENDKQTTEKQTKEEKQQLYKQTKILFDDIIYNTDKSENEYKAWKTTHKSFLIPEKIKKNVHYDLECSPQHYLSPMIYMSLKLEEQEKKLFQFCPLRRTLIPKYMTIDTKTLITMLFNTKKHETTQGKLLDNLNDSKELIWKTLFNMEKINTLMNVDKYTFNHMFSTDGVGCSLLFTRVDATDTNLPPPKNTGNKEYDYITELTNEELNHLKDYNKVAIDPGKNTLMFMTDDNGNTLTYTKMQRRIDTYAKKKRQIMMKSFEENNIKKLEEPLNQTCSMSCNYEKFIAYLKLRNQINQELQTYYEQELFRKLRWRSHTYTQKSESILINKIKRTFGKKIVIGFGSFQQTQQMKNCMPTPNKGLKDLLAKHFKLYIVDEFKTSKMCSFCLEGETGYYKQRENPRPFRKGMVNVHGLLTCTKCSKSSHSHLINRDLNGSRNILYLMKEWIQYRKRPTQFCRKPFFIS

SEQ ID NO: 782 - protein, 631 aa, synthetic construct
  REGION 1..631: note = Synthetic
ISSNYRTIKVPLTKVLKHFDIIQPKFEESVLRVNQFATIGYEFLKLYVLHLFENKVELPKINKALITKIFNLIGQGSNKGRKCKVSSDTITTFYNDIFSKIYPNKLNSSHLSYVLPILNDEMLRCFETNIKTHFLKYLCKYINVLIRYSLVDAVKMSKLTKLERKVQYQGINKEIRDIKNDIITMKIEKSNEKYHKFIKDTISLFPKDSIKKNNLIYNVKASPQKYILASLQLNKKIEDQGKKCYQVFCQRSNYVPKTITLNTSGLIEVINDTKREIYGIGYSKMNNNAKRYQKQAWREILKLENKQLFNHRDYIFYNQIQTDGISCNLLLIRKDFYNKTYGQKLPEYDEDIEFEIKQLEKLTKDECEKHLSKKLIGIDPGKKDIITMVDEQGNYYSYSNCRRRNDTYSKRSNQIVLAEKSKNDNEIIKMETKLSKFNKRTLSSNRFIDYLQEKQTYTKKLQEFYEKPLFRKLVLRRFCRTKSAEHTMLNEIERKFGKNLLLGLGDWSINSSYQMKGCMPTPNKGISKLLMKRFEVISVDEYKTSKLYNNDLTKELTNIKVKRGKKSKSIHTLLTPTRNPNGVILNRDRNACKNILLIMKEFLHTQTRKAEFSRTSQAKACFGLEKQIVDS

SEQ ID NO: 783 - protein, 347 aa, synthetic construct
  REGION 1..347: note = Synthetic
MNNNAKRYQKQAWREILKLENKQLFNHRDYIFYNQIQTDGISCNLLLIRKDFYNKTYGQKLPEYDEDIEFEIKQLEKLTKDECEKHLSKKLIGIDPGKHEIVTMTDEEGNYYSYSNCRRRNDTYSKRSNQIVLAEKSKNDNEIIKTETKLSKFNKRTLSSNKFIDYLQEKQTHTKKLQEFYEKPLFRKLGLRRFCRTKSAEHTMLNEIEKKFGKNLLLGLGDWSINSSYQMKGCMPTPNKGISKLLMKRFEVISVDEYKTSKLYNNDLTKELTNIKVKRGKKSKSIHTLLTPTRNPNGVILNRDRNACKNILLIMKEFLHTQKRKAEFSRYSQAKACFGLEKQIVDS

SEQ ID NO: 784 - protein, 721 aa, synthetic construct
  REGION 1..721: note = Synthetic
INKTQEHSIQNSIPVEALVHWRNPYRVIKCPLKKVLNHYNDLQPIIENYVREINQIVILGYQFIQLYILEHYNKGLDLPTIDQKWIENVLKVICVHSEKRGRPCEKESIDTKKDLKIFYDNTFSRVIKIPLMTSYHKSYCLKEQSKEMFNCLITNLKTNFIKYLSKYINLVHRQPRAFLIHQEKDPQKRKQLYAQLNTDMRNLKTDLIEDTLQNSDPSYHAWIQKEKKFMIPDNMLDNMAFDLKVQPLNYLTPALYINHKIEELGSRPYQVIPQRKSQIPHHITLDSTSIVELIWDHHQILSIPKFKCPLKRSVTQQSEQPQKTKKPANISLTYLKNNAGSYHELIWNRVLKLDHRTCKNDVFNQQPYTFYYQIKTNGFSCSLLFILEKYQNRKHGQKFEKHEHDDEYPQLKNLTKAQCDAYLKGNYKIISLDPGEIDPVSAIDERNQFFQYSACQRRQETYTKRSSEILYAEKLKHNIFAMESPYLKQNPHVKKKKKKFKHRRKKHKRESQSLPLPLPLPLPLPVKRISSRTTNPDQYQEFIGLKNEIDVQTKSFYENLLFRKLAFRRFVRTQQSEVKLVKTISHQYLTQKERTEGKKLLILYGDHSRGSQMKGCVPCPGRGMRRLLAKHFQIIEVDEYLTSQIHHQRKQKMDHLVVRENNHRHRVHKILTLLEDNERCIYVNRDYNACRNILNLGLEYLKTQTRPIEFQRKKKSGDAIK

SEQ ID NO: 785 - protein, 679 aa, synthetic construct
  REGION 1..679: note = Synthetic
SEQLYTMVKAPLAKVLKNYEVLQPIIEKNVIELTELPTLGNQLVFSYLLYQRKNNKPFPKLDKKFILDVLKTICKKETQRGSNKKKVDNKDLKNDLMNFYQKEFSKQILIQDEKGNKKPYQPNITNRTHIVEQIAKEMMTCIKTNLTTHFYEYLCKYINAIFKKPKTVEIKKIKDKKERKELYKVLNEDIRNLKFDIANAKISKSKEEYHQWIKTNLPLLVPVKGFTKDKNVAYDIKVKGRTELYYEYAFYINLQLELLGEKPYAVIPQRNSCIPKHIVLNTVACADLFGGLKEIFNVFNKSELVLHSKKHQKHIWSRILKTEMKSIFNHKKHIFYNQISTDGFSVSILFIDRKFKNKKFGEIIKEIDTSDEEDNYIPAESLTKEQCDELLNGNYKFISNDPGWNRPCSMIDENGKYYSYSAGRRRFETYTKRSAEILYQEKKKDGIFEIETSFSKIATSRTMNYEKYMNFIKEKFIMNNKLKPFYHNILWRKLQFRRYVRTKQADIKMLNEIENCYLTKEEKESGKKLVIMAGDYGRSSQMKGCIPTKCPKGIKRLLASRFLVHNVNEDYSSQLYHKTHSQLENVVVKNKHNKKKHLHQVLTLNLSDENKSLIKNDKLTKCKIFVNRDKNACKNILHIALYFLRNQKRPERFCRKVKEEKTKKSVKKTKKPSVIKSSV

SEQ ID NO: 786 - protein, 634 aa, synthetic construct
  REGION 1..634: note = Synthetic
GQQTHRSVKVKLKTILRNYTEFYPIIYDVLVRTNQLAIYGNQFLRMFILEKYTDNMKIDRQFIYNILKTIGTQEQIKYSNDNKYATIFEYYNNNLKKLKFDKINFKNISFVLQYASIEIATCLENNLMCHFKDHLNKYINILFLKKEKAKIKESCSDSKECGNKIKELVKDIKNLKYDLYTNSTLVKYNGLHSKWLTDNRNKIVPIFEKNNIGYHLKKDPLSILKYSIYINKQIEQLGKRPYQIIPQRNNSVYRHITIDHAGIVDMLGNKLIDTMNIQKKKNYITLHPKECQQKVFDAVFNMNHKTFRQGKHIFNYQFKTDGVSAVLDFVNHRVDKYEKKEKKTNNDVKKVTKKDILKNPKNDEGLLELEKLKNDEIKEINTKYKLIGNDPGLKSLMTAVDEKGKVFQYNAVQRRHETYHKFAHKIKQKERKSNGIDKIEETLSNYSCRTMNIEKYLDFVHSKNEVNKKVFKFYDEPKFRNINFRVYCREKSSEATLLNNIEKYFSDDTKKPLLFMYGNFSRSSAMKYFFPTPGKWFRKLISSRFKTILVDEFKTSCICNITEQENIKWKYMVNGKLKECNKVLSSIKNTNPRGEIVSRIFVDRDINGAKNILKIGKSWLKNKTRPFVFCRNKL

SEQ ID NO: 787 - protein, 623 aa, synthetic construct
  REGION 1..623: note = Synthetic
DKSAYKTFKIPLKSILQNRNLVQPVINNLVFEMNDLVIHVYQFIRLYVITCYSNKTDLPVIDNTFILYCLKVLGTRDVRGRHMANVGLLESLETFYTAEYQPLLNHDKTNLKNKPHLLPYLATQIHTSLSNNSQERFIQHFLRFVNKTTNNITDDKSTLFKFKHQVLSLNDETDELFNAWKTTHLHNILPSNIIKSVHYDVKVNPMNYLKGMLYMNEVLETGEHKLFQPLPLRNNIVPKHIILDTACLVSLFCPESSKKGELLKNITANQTVVWNNFLNLNHKIFKNAHYQFHHQIQTDGVSCSLLFIRKDLKDKKWGTRVPTIAEQDFYNIEDLSKEQLDGLSDRNVVGCDPGKKSLVYMMDENGKKLQYTAQQRKIESYGKRNQRILLQMKKKYKITEKETRLSLENSKTVDIAKFKRYLVEKTKLNKEVGEFYKQEVWRKMKFRQYSYGKKSIDTFLNKIQETFGSNILIGYGNWSRDTQMKHFMPTMNKGLRKQIHKRFDTITINEFNTSKLCCDCSQELKHYKDKKNTDVYRLFCCVSCQNKETVFRTRDANSAVNIRKLTRSWMETQTRPSEFCYKQGLSPVLEKSGKSKTIVVKTTFVEAQLIDFTPILNAVKIGV

SEQ ID NO: 788 - protein, 410 aa, synthetic construct
  REGION 1..410: note = Synthetic
MLYMNSVLEKQENKLFQPLPLRNNIIPKYIILDTASIINLFCPEKDKNGNKTKKGELLSNVKDNQTEIWCNFLDMKNKIFKNKHYQFHNQIQTDGISCCLLFIRKDLKDKKWGSRVPVLQEQDFHTIEDLSKEQLDTLKERNIVGCDPGKHSLVYMMDKKGNKLQYTASQRKIESYGKRNQIILLQEKKKHKIIEKETRLSIQNSKSVNYDKFKMYLVEKDKLNKETTDFYKKEVWRKMKFRQYSYGKKSIDTFLNKIQETFGENILIGYGNWSRSSQMKYTMPTMNKGLRKLIHKKYDTITINEFYTSQKCCECRKVLKHYKDKNGGEIYRLFTCSNCVSCENKNIVFRTRDKNSAINILNLTECWIHNQTRPLEFQFQASSFTCGNKKTGLSKTIGVKKQPRKSKHAC

SEQ ID NO: 789 - protein, 623 aa, synthetic construct
  REGION 1..623: note = Synthetic
EKTPYKSFKIPLKTVIKNKELISTIDNLVSNLNDLVISSYQFLRLYILYKYNLNQPIEITSELISYSIKILGISNSKKPLNNQILLQELTYFYENQFKPTVNHVKVNLEHLSHFISNIVVQMMTCISNNCQERFISHFRRFINETLDVSEGERFKFKNNILKCCSDNISYCDNEKINLWMNTHLNNILPGNIKKSIHYDVKVRPLEYLKGMFYMNYILEGMGKKLFQFFPLRTNIIPSNIMIDTSSLVDYFYKDLNLVNDKSKIMAKINDNKNNVWVNFLLSNHKIFRSTSYQFAYSIQTDGISCSLLFIRKDLKDEKRGSKLLTLPPLPLINDFPKLIEMNESEKVFALNDNVNIIGCDPGKKSLVYMVDSFGNKLQYSAFQRKFESKSYRSEYILKHAKEEHKVSQLESSLSEENSKTVVYAKFQQYLFLKTQLNINTKQFYSHPTFRRLKLRQFIYSKKSEDKFIDRISKTFGKINGVDKTILIAYGDWSKTEQMKNFIPTLGIGLRRLIHKKYYTVTVHEAYTSQRCSTCYTKLEHYNVKSKEIYRLLTCSGCVRSENKKITFKQRDVNGATNIMNLAKYYLRYNDRIPGLCRNYTPVNQNYKSSTMIYHGIKFDSKLK

SEQ ID NO: 790 - protein, 608 aa, synthetic construct
  REGION 1..608: note = Synthetic
MKKPYKTIKTSLKSILLPINALATKTFINNLCIKCNDIVIETYQFIRLFCLKNYHNNLPIPELSEKFISYCMKTLGIRDNRGKKSKEPILSKLQTFYDEEFKQLQAHPEKFDIKCMTHLFSYLSTQIHTGIHNNIKIHFCTRLSRFINKTVTIYESDLTKEQAKKERIVLKKAIYENTPPPERYKVWYDSYRTKILPETWTNCIAYDVKVSPEKYLPYSFFMNNVLEEKGCKLFQPLSLRNSIIPHYITLDTASIVNVFSMKGKGVLLSNITENQKEIWENFFNLNHKIFKQKDYNFNYTIQTDGIGVSLLFVHKNHIKFGESSCSNKDALTYKYIEECTKDKLESLKTKKIVGADPGKFSLIYMTDGKNKLRYNAFQRHTETYAMRNSQIMLSEKTKNRIIEKETSLSEKNCKTVNYEKFKEYLKIKNKLNAELKSFYIRELFRKMKWRRFVYTQKSESRFLNNIQKIFGKPEDVVIAYGDWSRSSQMNNFMSTPGKGIRKLITQKYETISINEFRTSKLCCKCYKELDHYKKEANQVYRCLICKECGSSPSKLSRFVTRDLNAAQNILNLCELWIKEQKRPEAFQRKVEGQAPTPSKDGGTECLSH

SEQ ID NO: 791 - protein, 636 aa, synthetic construct
  REGION 1..636: note = Synthetic
EKGSFITIKTSLKSILKNYDVNFPIINNIVLECNEIVIRTYQFIRLYILYKFYRNEDIPNFDKDTILYFIRACGIRDKRGKKATNKKLEDELNEFYENQFKNCINKPKFNLKNKSYLTPYLAQQIQTSFNNNLKEHFITRIRRFMNITNPDNKLDKNNFCKIKNLILLDKSDKIPEIISKINNLSQPNKDILSRKYMDFSNEIKNNYLPKEYDKCYGYDVKVNPMKYLFYTIKMNKTIEDINKEIKNNKNLTDEEIRCKTKKLFQPISLRKTIIPSYITLDTNVILSIFKNSGESNMNKETKKNKDKIWDKIFRINKRVMKMKDYEYKTIQTDGIGVSICFQKKGKKYKENSKIDDEDNEMYISDLTIEDLEKCKTKKLVSIDPGKKDLVYMVDDNKNKLKYTSCQRRIESLSKRCNKIIQTEKIKKGIIEKETILSKYNCKTVNYEEFKKYIIEKTKLNDELRSFYEENLYRKLKWRTCIYRRKSEDKFLNRIEEKFGKNLLLCYGNWSRTKQMKYIMPTKGIGLRRIIRKKYDVVLIDEYKTSKLCNHCGNELENYNNIHRLLVCKNCKGNIKANKSNGSESKKITFMNRDMNACMNMLEISHKWIKFRERPNKFKRKPLDTCFSNEKILTCIQ

SEQ ID NO: 792 - protein, 620 aa, synthetic construct
  REGION 1..620: note = Synthetic
VNQYYKTVKTSLRSIVKDDVVCEKINNCVKTSNRIVIKTYLFLRLLTLHNYHNKIVNPIMDNDFVDYCIRTVSIRKDKRGIKDSKNLELKNMLNEFYEQEFKPLLPLNEEIETYTGMTFILPYLAEQISSVIKTNIKEHYVTRLKRYLNIIHGVKFREKLEKERDSKIRKEIRKEQWEHIHGILKDLCTNSLNNSHRIYHKWILENRDHLVPKKMEKDSLYYDIACENNTFNYVNYGYYINEQIEKLSTEEKPYKLFQPFSLRTSVTPKYIKIDNSCIVNLFATGNKSLLLKAHKKDPIQERKKNHQLNNLWNTLFKTEKKVFNSVNGFQFTRSFCTDGISVSLLFIRNDIASLSKAKRSKYQSTERDWYNLNDLNKHQLEHLKCKKVVGVDPGKSNLVYLVDGNKTLRYTAMQKRYESGNKYYNKLLKSDKEKNGVHKLENELSEYTCKTSGYDKYKDFIAKKMIINCKIRKYYERAYHRKYRFKKYIRTCKSYDKFLNKIEEVFGDDPILGYGNWSRKSQMKGHIPTIGKGLRKVISKRFTNITVDEYNTSKICYNCHCETEKLRVRNKKVHRLLSCKSKDCKTIWNRDLNGGLNIMNLMKCFLHTGNRPDAFKRTGK

SEQ ID NO: 793 - protein, 911 aa, synthetic construct
  REGION 1..911: note = Synthetic
VNDEYRSLKIILGAILKKPEDLQLFEDHAIIMHHLSTFTSQLIHIYIGQLKKNNIQEPITQSTYEHAMKLIATKDFELSEKEKNLFNAFNTLKTSIGIQEFEKYTSISHLIHTAATQMFTNFKVNITTHYYKRLRRVIYLLIEHHPEYSKLEDDDKSKKRLQILNSIIDRNMNSEHTQFQDLINQCIKDFIPGDHWTKGSLGSELACCYAKFIYPTFALEAKLEDMGKKALNEYYKKKTNNVIESQDKTAVIIEKNRGPIPKKTFKKYPKISKKKKSELSNELIDEYTIKKKYACFQSVPIKSSFIIGYYGINSQSLLYIGDFTGIPGYINKRKTMDELGKDPKKKKMIWGRYFNLNHPIFQKQYKKGYRFDYSISTDGFGCTLKFVPKTKPTYAESGYKKSKLNPKKSSDVNEIDNDVSNESINPKTLSDTNEINNGVSNGLNNECTSELSDNKTINETTLSSKKLIKPKIIKKIPVKKHKAPVKPKTIKEKGWHCPQISDLDPNDRLKLANRKLAGVDPGYKNLVVIVSGSKANGTFKKYVYKASHRKLDTQFFKIQKTRNKLRKQHSLNELEKPLSATNSKSLDVEIFLEYIKVHYEVSLKVNAIYQNIVFRKIKYYSQLRAKSSLEKLVNDIKRIFGPDVVLLYGNWSRSTQMKGLMPVPGLGIKKRLARSFEMYDVDEYCTSKMCCNCHKELKNKVVIDKNTGQRKEIYRVLVCDKCIGEDGKMIESRHIHRDINGAVDILKLGKLDIEGKPRPEAFCRKPLDTNKSKTQVKTRSKKQVKKTISNKQVKKTISKKQVKIISNKQTIKQEIKPNVQSKIKPNIYVKTQPKIKPNIHIKTQPNGLSMIENPSVTQTQRQKIFKKINPGLMDDIIIQSKIKMIIIPDEYDHNQNQGPSNDPHLQDEFCK

SEQ ID NO: 794 - protein, 766 aa, synthetic construct
  REGION 1..766: note = Synthetic
LFSGFRAIKVPLKNISNNPEFFEELAIRLHDLVTFGYELVYLYITDCFENNIDILPICKKTYLYAMQILSNDLNFMPKDKQSEQLFDVFKRLFRPKIIDFSDYKFNGLSALMDSVAVECITSYKNNIFMHFHQRLKRVIYLFVKYHPDFSGLDEKMQNQIPYKVLNAVTNRQLDNDIPNSFIPIVKQSILDFIPGNAWKKSYEYDLKSDTNKFLLPTLRLEHKLEELLKRDLAILEQKKKDGFFENKIEENNITPTLVAKVKKNRKRKPFKRKTKRYRTNRKKKEKPTYDAATKAEFDIRKKYKSFQAVPLRTAYVPCYFKMHTFSLLRKGNFDGPGGIPGFPSIGNVIKILAKKADTNLKEIPSEEELDEKSIEMRKIMWGHYLNLDHKIFRKQERKGFRFFNTILTDGFGCTLLFVKKGKQYVNGKLVDDDTEPEDDTTKEKYSFPILSNLSNAEKLELLEGTLIGCDPGTFYMSCMVDNNPNGNPEGPKTYYCCDADCKRETMAYKTNATRRKILKKAGVTIAEQPLSKTNKKILTVESLCEYIKTHHEVGKIVKPIYQNVVFRKLKYYSKMRRTAWLQKLPDKIEKEFGRDAVLLYGNWSQTSNMKGLSPTPGKAVKMCLARRFRTFDIDEYGTSKYCSRCYEELEHLKYVDKNGKTQTSYRLLICRECSNQQGQTVNIRHIARDNNGASGCLMLGIKELKGEQRPDNFTRGFKKKKENPVPIVPPVMRKKINTPLRTPIPPVIALKKVNITKKTQINGESW

SEQ ID NO: 795 - protein, 771 aa, synthetic construct
  REGION 1..771: note = Synthetic
SNPKFRSIKTTVNHVLLDKDRDLPLLNHYVLQINKMITFTFLLVRAFLIKQYKDKQPLLDIQESTFEVAMQCICQPDDISHDSKSEDDNKRKEKALIVNFFKTSFLPLINDRKSLPDWNYKTDRIINGQHIIKNKKLPFSPFIQKLRTNMLTVFINNIWMHYFKRLKRTIYTIVEKNPIFIADKRINKEKKKIKYGIFNAVLSRNRQSEYPEYQDLINESIQSFIPKEQHSAEWVNDSLQYDLKANSRKFFIPSIAMQEKLESLEVSGFQSIPLRKSFVPHYIQIDSVVLKKILKIPGKKLTAMKIKTSKIIEESNNNPIDGDSINSSPEAKYTIDPKDELWSLFLNLDLPIFKQNGYSFFHSIEIDGFGCVLKFQRNEQQYNKYDKNKKSKKTGGKKGKKSKGTKKKINDHSKLADEINNEDINEKDNNENNEEELENKLLDDDYDYEDNLNMYINNLSPEQREELKDCILVGVDPGKYNIIQMVGSNGKVLRYRIPQRRTESGTHDNYMVRKKIYDSKPEVIELLNKLSKTSSITVDYDKFCDYIKVRSEITPKLTEMYDLIVFRKLKFRGQIRAQASYDKLIDRIQRTFGANCVLLYGNWSRTSQMKGIVPTPGIGLRNLLSTKFRLFIIDEYKTSKKCCHCHKDLEMVYKEIQAGKNHKKNQKKKKNKNKKVQKSGKKRIYRVLVCRKCPNLNGYEGIRYIQRDINGGKNILDRGREEIYGLPRALAFQRTRNVEIPIGTLAKIKIKIIRKEPGSTSLDLSLSEKTG

SEQ ID NO: 796 - protein, 685 aa, synthetic construct
  REGION 1..685: note = Synthetic
LDKYQVIKVPLAKILRDPEKNHPILFSAVKNCHIIVSLAYQLLRLYYLNLFEANKPLPILNQTICEYATSIINSPNKDGCETDLKRDLRDFYHSEYKSTIHYSLNYTGVPVSTILQSLSKEMATMFENNISMHFIKRLRLVIRHKLKTTFPKWDKYQINRGVSKIYDCLFDRDASNLSVELLPIYNFCLHEFIPEQAYTKSLAYDVEAHTHRYLLPTFKLNQYLELNHCKLFQPLPLRKSMVPCHIPLDTYALNYLFDLTKLTTNYNTKNKIANGLVSNPELKYLIWNHLFKLDNKIFKMDMNHKRPKQKPRYKFIYSITTDGVSCSIKFCHREHIDLHNNRFVKKDLRKTPFLTDEAEFIENDEYLLKIGKISKVERGKLLKMSELTPTEKEFYLKKPLVGGDPGLGNLIQLVNKKQHLKYTRQQRYRETHIIQNQKTVHKLRTLKIEVPNHYIEPNNPEPEPVNIQSMERCLNAYNSKTMDYDYFKEFLYLKNQVTAITLTHYLKAVYRKMGLRHYIYTKVSEARLVRNIKATFGSDIVILYGNWSRSTHMKYNAPVPGKGLRDLLAKYFTVIITDEFRSSSICYYSQDQVANRKFERQGAKKKKTKTNKKKIHRCLVCEECCSSKNGGKVPRFMNRDIMGALNILMLGQCDLKNKERPKAYKRAKFGKEETQATSSTLPKVV

SEQ ID NO: 797 - protein, 811 aa, synthetic construct
  REGION 1..811: note = Synthetic
DKISTRGYKHRINQLFRPKQVERIDEAVRYVHAIMGNATLLIKYRLIKLVHDSQDRDVAPLILNETQILNAIRAVQNRPHHPQSTASTSTSMKKRKTRKTHDSSSTPHNESPNEVPTESALVKRRRVTQKHVTAPTISTFVPGPIDTQLNDRRLLLESWILDYGEMTSSCLDIVPLSERGKDLSVSHMLGLAAKQYASSVMSNIRYHFRSYVCCALGIVLRSKACVSEGVRHFDDITSQRKKYWKREFGKAYDDVLEHRYDTQMRTCEDLKGLVNRHRPHLVPSLPERVRRIDTDLDSSTRPYVYLAYMIRISDFIERAGLVSCKRRRLLSPLPLKTSFIPSHYSIDTTTISHLLLDDVKGFKCYFEDGSQRRGKTFPLPGLKDKASICASLDKLAGRKTSPDDEEAYKDALWTFLANFKNRRTKVLNPITCQMTTKEGTLRFAHSISTDGYSVTLICNNERVRGRHHTYQSGASRRKKKETSKGDDEEISKAFKGEFPLLNVETVDEIVTYFRDIGCIDSKRFVGGDPGKGVLLALMDEFRKKLTYTSKQRKHETDGGNRRTRRRVKTLKDGSKRTLERGFVSSITQRSKASTKRLDVGNVTFPSLSNGSVPRTLSYVTTRALEAEMRRTRATPKTVNLSWLRFYVALRETSRVGFEATYWRKMYRAMRFTGWCKRKGSVERFVDRIREKYGNDENKQVVILYGNWGRRPNLRHQAPTPGIGLRRLIHSSKGITTVTVHEAYTSSYDPVTLREVEEVRGTHALLREEQDITNPFQKRGCFWSRDVLGALNILRKGRHILSSRSPHPIFGG

SEQ ID NO: 798 - protein, 782 aa, synthetic construct
  REGION 1..782: note = Synthetic
SPYVTRGYKHRINQFFRLDDATRIREATEYVHAVMGNATLLIKYRLIKFATDPNRDRDGPPMMLNEADVLNAVRAVQYLPPATKTKDGKKRALEAPVGTRARVRKVHRSDTAVDVPSTSTPEETTAEDKVAMEERIASQRDERQDRNDAWLSDYREMTADCLEPVLLGRRGWNLSVSHVFGNAAKQYVAAVVANVRYHFRSYVCRSLGIVLRSKICALEGVKRFKDLSSRSSRHWRAEMGKAYDDVLFHRTGQNMKTVPEMRVVVERHRSHLVPPLPPRKRCIDDDLDSSTRPFVYLGYMIRMTAFVEASGGTKGLFSPIPLKTSHIPAHYTFDTSSIAHLLMDGKRIDGFKRFFEHSVSGGYPLPGLKDKSSLLASLERQRGADKGGVTAVDEELYLDAIWTYLAYFKNRRTKVTNPLYPCGKNRKENGGLSFGHSISTDGYSVTLLATNQVTRGRKHVYQSGASSRKRVPEPTVRPGRDKDGFLKLSAFGGTDYVKEELQKTGFTDPNNALGGDPGKGVLLLLQDGKGNTLRYTCAQRRHETCQSNHADKVKMCTRRVHFYDVLLPSRRSGEGQQKWKNMNTKKLEGEQRVRRLSMKTCDQRRMRTYVAYREACRPTLEATYTANTFRALRFLAWCRRDESIQMFVEEIKKKYGTRPSHKPGTSDDNVVQSPPIVIFYGDWGRRPNLKNQAPSPGIGLRRLLEASEGIVTVTVHEAYTSSYCPNCEGPVSEGRGKHGLLKCDHTAVCGTYWSRDVLGALNIRTKGLHLWNHAKKHPLFGG

SEQ ID NO: 799 - protein, 416 aa, synthetic construct
  REGION 1..416: note = Synthetic
MAQMIMDKQRLDAFKRFFEKKVVGGFKLPGLRNKANLCASLNTQKGGEATPEEEELYMDVLWSRMALFRNRRTKSLNPMFDAGKNEQNMKFGHSISTDGYSVTITVTNKRPRCRKRTYTSGASRRTRVPKGEENEEFLTLSVTKAEEVRQFLEAQGLERCKIISSDPGKGVLVQLTDGQGKSLRYTAKQRRHETIGKREIMNRETRRSKGTVRVPQRKGGGTYDWKEASTKKLETEMGRRGLTSKTCDETRYRMYVAFREASREAFDLTYTSNVYRSTRFTAWIKRKASVDRFAEEIKEKFGNGESNCQIVILYGNWGKRPNLRHQAPTPGIGLRRLLHATQGITTITIHESYTSSYCPNCHGTVEEARGSHGLLKCCDKKLCGTYWSRDVLGALNILEKGMHLLYGEGPHPLFGG

SEQ ID NO: 800 - protein, 728 aa, synthetic construct
  REGION 1..728: note = Synthetic
EEDGHKVHKTRLKHLVSDFAVVERIQYAVETIHDIAALALVFGKLLYLSDLDEAVQANNGAFDASVATRMAKAFPVDAEQIEIWFDVVSSDLEHRVGRPYSPEKAAGLARLHTFYSAQAARGLLPEVKLSSTNLSNPKGHAAAHLATNYSTNVHVHFDKYVHRFVDVELTAAAKTRLGLSHRKRLPREARREVNSEVRAVVRDLLEAPPTPTCRDGQLRLWLEQNRSFLVPPRPPGAEGQHWRFLNQKKNPQRWLPYMVWINRRLEDSGSKLLSPLPQKTDFVPGHIRLDTVGLIDLLVADADGALLVKAELEGMDMPFLDGDVGPVKYDLPGLLVTGKKKNAVPQPSKGRLYVGLEQLVSPALLPRVQTDAIKHAAAFKTAVWRCLTKLGANKHVPTVYYNDMVFNNVIDTDGVSASPHYVSPSMFGLTRYNGGFTKLKETQRSQVRREKAKGATYVTDLSDDERGAVLCDPGKKTSCDPGKACIACLTDGNGKTLSYTSAQRRVESGAKAHAKAHQRMLDVRLDGDGRTARTLVSTIGRIQAAGTMSWSSKSTNLEHFEHYLRTRRAVADELSAFYRRRTFRQARYDAYVGRRASEDRFFSKAKAAFGYDAVILYGDWGRKPNIPHQPPSPGVGFRRRMCSHFRVFLVHEPYTSSVCPRCGTHGMAKPRLDRRGNEIHHLLRCPNHSCSCRWWNRDTLGGLNILKTGIHALRTGAWHPAFSAAAAA

SEQ ID NO: 801 - protein, 439 aa, synthetic construct
  REGION 1..439: note = Synthetic
LIDLLVDGTDDTLVLKAALEESAMPAGESADPEPGPSRVRPAAVKYELPGLMSRPPKGGEPKACKAMLYTDLGTLVSPRLAELVRRDPAKHAVAFKTAIWRCLTKLGSNKHAGVEHMDLVFNNVIDTDGHSVSLHYVSRSLHGLTRFNGGFKALVTSQRRQAREEKAKGATYVTSLPEAERAALLRGTIVACDPGKASLATVTDGWGRAVSYSAAQRRAESGSLAHAKEHRMHWLLAVRPDPGARTAGELIRTIGAVPGLPGVVRSAKSCVPVHYEQYLRSRVAVEAPLKAFYRRPAFRAHRYDAHVGRRASEDRFASRIKAAFGDDVTILYGDWGRTPNLRHQPPSPGVGLRRRLCGHFRVYLVHEAYTSSRCPRCRGREVTKPRQDNRGEDVHHLLKCADRLCSCHWWNRDVLGALNILATGKHALRTGAWDPLFAA

SEQ ID NO: 802 - protein, 684 aa, synthetic construct
  REGION 1..684: note = Synthetic
QVVKRKAKGFFKPEDIPTIQQTVQDVHDIISNASILLRAFYIDWIDRNGLANPIILEHHHIALACNVVQGAQEAPVRGKDSCKGCNDCPKCQKIELFNDLLRVFNTLYDKPNAIVTDFSVSHVIAYYIETLFTAYETNITTHFPKYPKRYITCDLLSKGFGPRVAKKIAGILVSHYLYDASLDSLKLLDELKDVSIHVNAFKDLFLEKQTVKEKSRAWDVKVHPWLYLAKMVEINKLLESRFTDVPAKYRKLLNPLPFHSSFVPMHIRLDTSGLSQLLMDNKKIEDFKQMYSAFYPDLTLNMKSKADMLSSFEKLVGRKENTKEESGLFATHLWDYMTNLTSCDQFKELYKSIKGTEWMFDNAVVTDGITISFQIIQRSVFGRKCLTGRKKAKEDVEEEIREPVKVLDHQKVLGCDPGKRDLLAITDGFKTITYTKGQRDQDVYKTIRQNLGVKRKRAAQLEEYETTVLNQCCKRSCDFDTFKGYCNARKGKEDELSKLYSHPVYRQFKFTNYCKTKSSEAKFVNKVFNAFGPSQDLGSKKNHCMDGSMVENAKKEVSSTKDLVISWGNWGKNPNALKGIGPTPGIGLRRRMESWFPTITTNEYLTSQRCPCCHGSRCLKKVKLPVIERHHLLRCTNDECQSRWWNRNVVGSFNILFKGLHAEAVFGEEEKVKRPKKRSKTAPC

SEQ ID NO: 803 - protein, 731 aa, synthetic construct
  REGION 1..731: note = Synthetic
VVIGCSLAKAVLNAQHLEQIRDGVERTHRATVLATELLNLHARRVLEDGEEVPDFFSGNWAKQAWVAVSTISGKVGTSLQASRQAQVDLHGGALAEVDAAKTGQLFKFAADQFASTAATNLQLHLRKRVGAYVNMSFAVDKDAWAAMARTERHAHKLKKRRLHWDVCRIDTEARKLTDAADTAWVDATRTLLGFDGLEWADKPLEYHARADPRRFLRSTWTILGRLGEAGWRGFSLLPLRRGLVPKYATVDTRALRDLLGLGTSDARKRMDKAAQLRKQAASGMNDATPHKRTRRTPEELADEHWEAWDAVFDLSAVLRSGLCGRHPQNRRGLAFGFSMTTDGVGCSLKFTLPKSANVASSADESSTPGKRKRGNASSAEAAAPRLGALPSRGIWPLDAIKHLARADGAGRSEPPSGGAPQDVAAYLDALLEVQVVGVDPGKTELAVATDPALAATRHKIRTVRYTAAQRRMETTPGVFHRKARPAIRGEDHGAERAGLASEYHREFVRKPVSVASMEQTLSSTCASVASSVAFGSYVSARAAVLAPLLAHYAHHHHRRHRWRHRRESERSVARFVSQLKSLQRDPARPVVVAWGAWGAIAGRPGQPVNRGSAPCIGVGLMRRVARDLPVVKTPEYCTSKTCCRCGGACGNHATVEANRLRDHPRWRAREIRGLRLCQNSECRRPLNRDANAAVNIGTNLMCLLYDAPLVAQMSAGDVEMTTMEAAAATAQ

SEQ ID NO: 804 - protein, 937 aa, synthetic construct
  REGION 1..937: note = Synthetic
CGDPNEPVEVPGLGDAGEDEEESPPPEPPTVVQPPESVPDGAQDVVTADRAVACRLDPIVRNEAALEKIRAMARWMHGVRRDAYELINHHVFRVLETGGTLPDLHEDSVVYRFLVAVTTAPSETKAYSDLDTEIATTLSQCMPGFVRHIPLTGSLPVMQLERIRYTSHLKTQVHRSFRKRVGRIVQLRLRLDDAAAAALTREERTRRKCMTKIAMISATRPRGSAGLEGEFKAVVDAVISDLRIDKIDLKIKDVAKSIPYVLKAKPTRFLPALWRINLELEAAGETRFGLVPLTTSNVPGFIALDQGVLKRMGLVDKQAQVEINRRIKIRTTAVAPYKAQLRSLRAEISKHESEWKDADHNLKMGRYPDFSLRWIVSDLISQVEFEAAAAATASNGKKRKRDASKPTRARKRQAMPKTAVPTAEQKLIDEAESERRAATLQPFRDEIAAIESDPIYLQLVDDASNEKRDTFEAVFDISKTMRHPEQWSHSFSTDGFSARLMMRRPQKSLPTYTKSTDGSKTSNKPKLTAMPKCGIFPIEEIKGLLTNEVPIESVEARRLSALPPLALNSELKVKLDRAHGVSCPYLIMGVDPGKSELVVITDPDIAFRNHNERLQFPLPSTERERKFCPETQAAVRYTSKQRKFETTPGHYILNKNGHRDPKRVALAVSAKSYRDSTKPTDPERLKAAIASLSLHCKNAATGSGFRAYTDARRTAQPLLDATYADDDFMHRRLRWKAFIDKQKSLQGLVNRLKAIERSTGKQIILAYGSWGMHAGEAGSPVNKGSPPCLGVGLARHLARSFVVSWTPEHFTSKTCFHCGCHECKNHDKIAEQHRPKRDARALKRRDERLAHLETSGGTQAAKDKTESIYQRTISAVPELRSLRFCPTCTRCLNRDRNAANNIGLQFKRLIFDLGTIKSMTKSEKELNDADAEIEGAD

SEQ ID NO: 805 - protein, 760 aa, synthetic construct
  REGION 1..760: note = Synthetic
LPSSERVIAVGIREVVPQLLHQVRIEDAVNRIHRITIDATELVARHVARCIHEGIRLPTVSKDYYKMAMMLVTVGNGDLKSVDVALQYTRNTMTSLHPVSRVNLNQLMMAQSISLSAAFNTNLQLHFRKRVARYVRLLRQPEPDAKEEKKVRKLENLMIASDVCKGKGRTFESPDALHSMVRMLRERLETRNFESDFMETNVKHFQAEIIRATHRMNAAFEADEQHCLSVCPLRRRVTPGFIQIDTTGIQQVLGLDRTDYERERDRKATKRRKLHALRDARNRELRSAMDFAVIPRVKAKTLEVEVDRTTARAAAKRIQRAWRRVAHVDVCRIARKRPLMLRKVQMVISEWAGKQKEERRRCAEGLLQCKESVWKDVLHLSRKTVRSRKDDVFAGSLRTDGVSVRLFFKSSPGTSGTSSDDATTNKKRKRGDTSGKKKKPPSPIGSSDDPVPSRGLYVVDELKHLSRMKVAQIIGADPGKRELLVCVDADSPKFTNEKRRRLPSARYTMAQRRKEMQSDRHTAERVATTPESISTAMHAMADTNSRSASFDSLEQYFIRRREWLGDALTHFQKSQHRHRRWQRFMSEQSSFASFMSRIRALRHDNSTPLVIAYGAWGGIAGRPGAVCNRGHPPCIGKGLRHKLSKHFCVISTPESMTSKTCSLCESVCGPCTEVDAFHRAKKIEEAGSDADAVSRAQHFSVRGLRRCSNVECAAHLNRDYNAAINIQRRCKSMLSGGQPPAMDSIDEKLDALQMKIQHGG

SEQ ID NO: 806 - protein, 724 aa, synthetic construct
  REGION 1..724: note = Synthetic
MVDPNRPYTVGCRLAHLVPDRTHAAAIEDAVTRVHRATFLATELANLHLRRCLEDHTAVEELFSANWLTNIYNEVTVGQGNPRVIAALRQTKAQHMPTFVPPSRTGLSQCIMYECRNLAAVAANNVWMHFSKRVRTHVRHCLALDETAYAALTKEQKTARRLLLLQLVRDILRNPTEAHAAPTVHHPWITTERATLGIDTAVGQWDDKPILYHLKAHPHRFVAAMAHMSTVREQGGGRAFALFPLRRTYTPRHVRFDQHALRELLKLGGSEHRKKKQRKAKTCSETSDPRPDEFDLPPLQCAHHTAPMQSNPAQDEGDPWDLPPLQCSHQSEHILADLAADEPELPPLQGSQQDLIQASLLCASSPETPAAVMPPLRAKRTRRSRTELVGEKAELFHRVLDLRAANVHRRHHFEFAFTTDGVCARLAMKAATKAHVTPLAAMPKRGMWSIDELKRVSRLEQLHVVGVDPGKRELVVGVDMDDPNACTPVRYTQRQRQFETCSKQYAHEGKRDKPLVVCQAEEELCNYRSRSADLATFEAYCAKRREGFERALCFYGDLGHRRRRWKTVIKAQQSEARLYRRFEALRKPDRPLVLAYGAWGLVAGRADMACNKGNAPCIGVGLMRKLARRFVVAPTPEAYTSKTCCKCLGECGPWAAMEEQRGKRIRGLRLCQTENCRLRINRDRNGATNIGTNFKRLFEGQGTIRALSEDELQLHRLQSVFDVS

SEQ ID NO: 807 - protein, 652 aa, synthetic construct
  REGION 1..652: note = Synthetic
APDPGPRAYTVSCSLAKAVVDPAHLASILDAVARVHTCTYHATDLLNLYVRDRLEHHGGTGLDGIFTQNWLLGAYNAVSVAKGRGAKVDAGVQAVFDAHMRGTFAPPMRAGLTQALTYECINLAAVGSTNVWKHFQKRVLAYTRTAFALDEEQYAALSKDACRARKLALLQAANDVCRPPDEPKRSPDAYHAWVDATRAALGIDAAVGDWKGKPLLWHLKAKPHRFLKATHAMSLAQHAAGRKAFALFPLRRAHVPRHVRFDKKVLDSLLGLGEEYAVGKAKKAAGPDLNAPAGRAPKRKRDDPSLLQEKAIVFDRVLDLKRAGVHRRRHFAFAFTTDGVSLHLNMEQPPIAAAPPPPPPRLPRRGVHSIDALKAAARAADDLHVIGIDPGKRELVVCVDADNPKKAPVVRYTLAQRCHDLRTRQYADEAKRGKPAAVTDAEEELSAFHSKAPSLDEYARFSAKRRALLREREEIVDFYADLAFRERRRKTKIKAQQSEARLVARLRGMHAADDPRQLVLAYGAWGLVAGRPNMPGNKGHPPAIGVGLMKRLARDFVVALTPEHYTSKTCVKCSGPCGAHPTLKTKTNKEIRGLRVCQHEGCGLLQNRDRMGATNIGFQFARLVRGQPPLRPMSNEELEFHRLQMCAECDGD

SEQ ID NO: 808 - protein, 656 aa, synthetic construct
  REGION 1..656: note = Synthetic
THKTIACRLSKLIPDERTVSDVRMAVSLVHEVTIQATSLLNLHIRSCIANANLISSKLFERNWILKAFQEVTVCKTGKVCARDLELAQTMTHMPDFTAVDRSGLTQLFLSNATLIASNAKNNIWMHFNRRLLAYVKRQLEIPKQEYDALTKAEKTARMIQLNRIATDIRRMPSDAITSSIEYHAFVELQREILRIDISVGNWNDKPLLYHLKTKPHAFLKATSLMSHCNEDSGRSGFSLYPLRRSMVPGFIRFDADSLNKALQLLQNRRLGRKRRPKAEEEFTFTNTVDYRAAGIKQRWRIDDGFSTDGMSVRVQQFLGDAATVQKLRCKKREVAEKKAEGRKRKRNDEPMAENSQKEKPSKSNSNPVLTKMPERGIWAIDELKRISRLDSLHIVGVDPGKRELIAATDSDDPKSCTIRYTIAQRQKDMRSRQYAYEGRRDKPNGVHDAERILSDYNSRTADFETFKGYIRARQAHLMECLKFYGEMHHRHRRWKTFIKRQKSEELLYKRLKSFKTDERPLVLAYGSWGTIAGTKSACNKGNPSCIGVGLMRKIAKRFVVAITPEAYTSKTCHECLGTCGPHPTMRSMRNKREIRGLRVCQDPNCNRLLNRDANASRNIGLQFKLLFEDKGTIRSLSALELEMTKHRMCLECVMEN

SEQ ID NO: 809 - protein, 646 aa, synthetic construct
  REGION 1..646: note = Synthetic
KKDDARVIKCPLDKILKPEIVSIIRDIVPVYNRIAISATLFLNLRIRQLVESRASSTEFAQFFQANKLVKYFMAVTSSTLGAGDLHAAFGTNFPSVIREDRPKAFSQVCMYICRNLEATATTNVWYHMKKRVCTVVKKTFGIPRDEWLHMSNEEKKNHKIHLKQVNVDVLSLEGDAFVSPEQYHDWISNLRSEMKVTHVTRQLLADTRGVDVDDPNVPGMVYYMKVKPYEFIYAIATLSSHLNSITGGGYALYPIRSSMVPKYLHLDELILADISPGISKGATNTAAGKKRTADGSELSNKDKLVARRMIVFKHVMTPKAFNKWENHLGWSVDTDGYGCSLHVKKKVNELPPSTHPSIHNGLIKIDAFKDKFSERYSINDLSIIGVDPGKREIVSAVDSMDYTSKYTFRKTHQDHLTGTVRHRKAMECTKPQSVFETEQDLATTSKKVVPVERFMDYATKLATSISSSSGFYEQGVYRKRKWKRHLRLQKAYSGIVNNLKMVSCHPNKPIVLAYGSWGMTTSGLPFKGLPPTIGIGMVRYLARFFPVVITPEYYTSTICPCCDSNVTRCTHVEQQRASPYFENGRLKDIRGLKHCPGCNTYFNRDNMGAWNIARNFTNMYQGMAPIRVRNAAQAAEQELTNRTEVD

SEQ ID NO: 810 - protein, 453 aa, synthetic construct
  REGION 1..453: note = Synthetic
MKVTHVTRQLLADTRGIDVDDPNVPGMVYYMKVKPCEFIYAIATLSSRLNALTGGGYALYPIRSSMVPKYLHLDELILSDIAPGIARSSANAAAGKKRTADGSELSNKDKLTARRMIVFKHVMTPKAFNKWKNQLDWSVDTDGYGCSLHTKKKVHERPPSESPSIHNGLFKIDEFKDKFSGRYSIDDISAVGIDPGKREIVSAVDSTDYTSKYTFRKTHQDHLTGTVRHRKAMERVKSQTIFETEQDLATTSKKVVPVERFMNYATKLATSISSSSGFYEQGVYRKRKWKRHLRLQKAYSSIVNNLKKVSCYPHKPIVLAYGSWGMSTSGLPFRGLPPTIGIGMIRYLARFFPVVITPEYYTSTICPCCESNVTRCTHVEQQRASPFFENGKLKEIRGLKHCPGCNTYFNRDNMGAWNIARNFTNMYQGMAPIRVRNAAQAAEQELTNRTEVD

SEQ ID NO: 811 - protein, 695 aa, synthetic construct
  REGION 1..695: note = Synthetic
EYVVKVPIERFLCGTALERVEHLVTVVHKARLLASKLLNLSLRSDVESELLHKGSVDFRPYFEGNWIKKAFVGVSAGRDQVDDPRLERVLRDYMPPHRPELLAPGADQAFMYAARNVAATAGTHVSFHLKDRIRRFITRTFKLSRGEYRELTSDARKQRIRDLKLVCLDALRLSDQPMRSPLKYHEWVDSERGIMQIDGISSADVRAIWTPVQTDGCPGLGFYAKKRPHLFVMAMVRAMNGHAKSSSIYPECQSCVPGYVHIDQRILSALIPKTGGRGQKQKLDPSLTATPSAPKPSGRRSRRPKGDPQLIAEKHFIFAGSEQDVLHPDVHKVIPRFWERFAYSFDTDGVATSVHMRRGSTAAAPPSLRASTAAAPPSLRQGGHWCARTTRWVTADELPAHGLYASADDFKERAGWRGGSEGACIVGVDPGVIEIISVVAIDSARHVKYTNRQRRAESGVVVNMRRLEQEKTPMVRGAEVSLGAFDSRALGFAAYQTYYTESLRTLEVRLKFYGDIQYRQRRWKMHLMRQKSESKLFRAIELLRPKEDTRPLLIAYGAWRLKTGTICRMGNPPALGVGMARKLSKQFRVIWTPEFMTSKTCLSCSSRCGRCAWLESSRPLNQRGRVPEIRGLRQFLNPDCGPKSGLLGHLFNRDRLGATNIGRNLARLLNGRPLISTPRGHDLELMDLDAEFHNN

SEQ ID NO: 812 - protein, 628 aa, synthetic construct
  REGION 1..628: note = Synthetic
RVIKCGLNSVARGDASKAFFRDVVRRAHDAKTAAHLLCKAWILERHQNGRSLPEGKGALVSLFADAVYAVGGNASSTRRARLVALRDAIFPVGFEVDCQRFFNWHVQMGKAYAAQVIEHLSRCYPQCLERYIASRLGLGGREHRQERMTIVRAVMRKEATPRVPAAEALLLVPARALQKGYAMYDIKIKDTALDYLPCMLHMAAHLEREGQRGYAVLPLVSSQVPASVFIDTDTLLYLLPEELLPPGRTKDSYLQAWRTPNPRGGPGRPRESDFDDDDWASKQERLYQGQARLWDLVLDLSKLPVRGSSLRFDNRIQTDGVSIAVYAEHRHEQRAKGKAEYAAYPDERYAHHIDDRAERAELQGRRTLVAIDPGKQNIIFATDAASVRRVGPQNRLEATTLRYTAKQREAETRQRRARAHAAAFRAIAPLAQGHSIDEWEAWLSKQPSGRTLDPAAFRAHILAFYAYADATRDFWDERFHREQRLDAHRRKQRSEARLVNAFKAKFGKPQDVVIAFGDGARNNLCGRAPGPSTAIRRLLQRSHYDVLDVHEPYTSKRCFACKRPDAENGPCRLDKAKGRDAWGVRRCCRCGTAWARDFHACLNIDRLAREHLAGLERPDYLTAGAAGG

SEQ ID NO: 813 - protein, 605 aa, synthetic construct
  REGION 1..605: note = Synthetic
RHEEEFIIKTSLRGSLKGSRDEKDRLQHCFKDWSDAMSQRLVFASRGLTLMVKECFNKSKDFKTAQLPNFLDQTFIRQLMLCGEGSRIENSYIKDLFTQHPYLLKPTPRHKGDRNLYSSAARAFLTNILTSLSYIFEKRFLKLVFYTKKLMDWKENETIAFIKHHILGDFLSKDILDMKLENKYPSLFNFIQSSKDFLGLEQSEIVTEQWLKANPYQVIRFYAYILSELSKDKELKLFNLLPLTDVKNHYATLDASCLLGVFKDVKILGEKAKEENITKELLDSVFKIPRNKAFTGTIQTDGTSICFHFRRPKKKVTKEQVDKHILQTKELFKEEKTRRLGCDPGRENIYTIIEEGTNKVWKLSRKEYYSVSGIYQGRERTEKWTRSILPNLNALSKVSSKGISLKSYLDYLKVFLENYETLWSVYSKKYWAEQRLRMYGGKKRCFDRFWNEVLGNEGERNQITVIAYGAGKFAPGGKGEISVPTSRAFKECKRQKGLKVLVVDEFRTSKLHHETEQLLHLVKVQGEKKSLRGLLWCCSTISEKQGFFVNRDVNAALNILKNCVDRKNIFTRKKDMKRLPKQEVKKIIKKERSSYKPRTLHDQKI

SEQ ID NO: 814 - protein, 569 aa, synthetic construct
  REGION 1..569: note = Synthetic
KFISETVVKCSLQSILVKDDFTDMFVEAVEKRMVACSKRTWNASICLNLLIRERFQGISDPTLVQLPDFCDQTFLRQLLLGTSGAVKPFPEITDLFDRHPKLLSHEERHIGDRNIYSAAAIKLSTNIKNHLVVNFPRFLKKYLYKVSGLTHDEAVASLYLINGWKQQRKKDIVLDMVKVDYCSRKLRYILGIGDETKVTDRWLKSNLPSILRLFVYINRALELNSLPLFNILPIMKIKAHFITMDTSVFTGILKDIGVAYEVPPETEMDFWYSVFNIQKITGKGKTFTRTMDTDGVAVNVHFNKPKVASDIKSVMNLKGKRVIGVDPGRTNIFEMVEKLKDGTYKEYSLTRNQYYTEAGMIEARKHSEHWNRYIRKEIAALSEASPKSMKLSKFMIYIKTSQQAQAALWNEYLNKHWRQQRLRLYGGKKRVFSKFLNRLGPLDNTVLAYGSAKFASGGKGEMSVPTTRAFKECSYRLPIVLVDEFRTSKIYWKNGTILELVNTFGSKKPLRGLLWCCSTSTEKGKFINRDVNAAINILNCATLPTRPIALQRSPNLRKIVQHVGKTIRF

SEQ ID NO: 815 - protein, 585 aa, synthetic construct
  REGION 1..585: note = Synthetic
KEFSETVVKSSLLRYIQGDGDVKSKIFNAIKERVEAYSKRMNLASIAISECIKELFISVEDVRNVVIPDLLDQTFIRQFIIGTDGAQQAIPMVAQFYRRHPEYQIVKIRHSADRNIYSSGAIKYITNLKNAFNIPFISRVRKFTSEYSTLHGLSTIDQKAMMCLINGWNIPKQYGKCFPLNEHIVTTIYTHRRVLDLAEDAQVSTKWLKKRSNMKNIVRYFGLLNRFKEENGLPTFNIVPMCRMGAHFMTIDSSSLYGIMKDLQLVNSNVETFLELADDHWRSFINISKLEGKQNKFTGTIETDGISMCSHFKRPKNINDEVTGNNTIHICPNDRVIAIDPGRENIFFGAELLENGKYKSYRLTRRHYYQQAGIFEARKKSEHWNLGVQQELSDLSLVSSKGIDLVNHIFYRITYLRHFDSLWSEYLKPRWARQRLRLYGGKKRVFANFFNKIKNGGDTSRRVVIAYGSAKFAPGGRNEISVPTTRAFKDCSIAFPTIVVDEFRSTIIHHEDDSVLQYIKRRDKDTTLRGLLWCNSPNNNKFVNRDLNAAINIRRCAVSQVRPIILQRLETNVKLAKVIGKVIKC

SEQ ID NO: 816 - protein, 621 aa, synthetic construct
  REGION 1..621: note = Synthetic
KSSNEFVIKCSLNNGLKINDSFFRESFLTSINKRVEQISKMAHRMSIAVNILIRECIEKADDYSNVDMPLFLSEKGTGATFLYQLATETSNATKPDPHVSYFLSRNKDLLPGKTPLRYSGDRNSVVMMVQGYITNYRTFIETTFKKNQEKYIYKWLKIHEIDIKYTNFIRYKINIWDHSKLKNVMELDTNTEEFIKRQQQILGISHSQEKISPGWIKKNYEKVVVYYSFMSEFFIKNEIRGITVAPLCKMKASFLHIDTDVFYGILKGCKMINCNFSKFKENAREIYDEYFKPEKLLTNNQLTNKGFKFTGTINTDGTAINFHYRRPKLPNDKKETTLERNDPCIRVIANDPGRKTLFYGIEDLGENRIKTYIFSRNKFYEESGSTKATKKCNKWNEIYLKKELEELSTTNSRSLYLKDFLGYVSIIKTHYNSLWGEYIKKKYSKQRFNLYSGKKRSYDNFFQSLDDKSGRKLIIAFGDAGFASTAKNELSAPTTTLEKQCRKWYKIVKVDEFRTTQLHCESGSILTKIKEHSLTKEGKPFVKTIRGLLRYKTSKFCKFIDRDKNAAKNILKCYRMFPLRPSGFNREDEKQEDPEPFYIVSTPKRIVVEFIREECILSDLE

SEQ ID NO: 817 - protein, 678 aa, synthetic construct
  REGION 1..678: note = Synthetic
VTQPWIDEAVLFVSRAMRAASMALNITLLDVLRKHNGRLPFEVDFTDHTLFNQLISVVVKGSDDTKKEIRFISEVKRIIAEYPRLFPAIKDLLNSRDIRHEARLTYQTSFINHHVLNIEQRMKTYIRVRLGPTTWNRVKKIHGLVYRLYGYVLNSNDELPCNRVLEEHYSWIHRIRKHYMNYKNLRDARYNKETPESLQTIVEFTYRLGCRVEQLRLIEEASQKDNPSTEDDNKPDDLRDIKEFQQKRSWSIAPIQSIKRHFVTFSATGLMLFFRTRMQTAMNTLDGKEIPWDMWSAARLKTTKKRKRGDSKPVYEIPESADLWPSIFKKDLFDLRKSKKVGWQFDQYVRTDGVSICCNFRSLYQRACSHKASSKKNKCGCGVCSGGDIPSQQPKQLVAIDPGCINLFYAVCKNEDGSYRVWKYRNKVYYDHGGKFRAREIAQKHLNRSMKAFKAMSKTRCKTIHFGDHLAYWRACAIHDTFLWLRLFTRIRAKMAFETYSRGMKTLDAFLKTLRDPEIAHEDFVIAYGAGLQTGTYNHAGTLSSPTSKAFKRTKRMYRTMLVNEDYTSQCCPHCSQRMVDKLVPWTFKDGRRGHKVVRSVKLCKSEECIERAKSDHVHPDVRQIAHQYGVCEVSRDGAGAKNILTCAECLIADGSRPTYFTRAGQADYEKQRGIMIV

SEQ ID NO: 818 - protein, 588 aa, synthetic construct
  REGION 1..588: note = Synthetic
EDFWTPEQRSVLLDLIREQVRNVSEMKVRASFVAHETILTCLRNPTRYKLPELEQSFFYQCLTVSSETKTNSLVKDVAENEFWDYPEIPRMMHDRDALSYAAREMVTVFNNNIKLPFLGRLKGFIATWMRKEGISPDDVSPFDVLATILKWKEKQRPMDEFPQIVRTFIVKERVHLQKQKGEGKTHRNLRYYYRVLELYRSWGVGSGFPLVPVYAIKSHFIGLTTESLCGILRDLQKRTEGPSWLPEGLTIEKMAEIHGERIWRRMFTLDGLVRRRRFNRYIQTDGHTIIVHFVAKKADIEERQRRAKKHKRDGNVVDHVLGFDPGRVNMVAGVEMRGEKVIRHVTLTRGSHYQALRGSIARRKRWDVPLLGVFARLGRGSLRSTCPVKNFEYRRAVIDNYTRLWDNKTSSKRGRERLFAFSKKRSGLDKFFSDLRGDRSQPAPRVVYGGASIRPNGKGEALTVPVKGVLASCKRFFNVEMVNEYLTTKTHAKCGVRMNPIKRRGESRAVRGLCWCPSCKVFVNRDGNAAENMCSLRATGRRPDHLKFGQAKVVMATLPLLPSRAEKQVKYKSAVSVFRKTGRFGFLE

SEQ ID NO: 819 - protein, 594 aa, synthetic construct
  REGION 1..594: note = Synthetic
KNLDSSVIKCSLSGRFCHDARHWPSEARAIMLQVLDEQVESLSQMMVRGSMVANEVLLTCLRENLPLPDLTSTNFFRHCIVGKSNDPLVSRVLGTVFQNHPEILRLKGDWAAINILTNRYVTNVKNSFVVPFLDRQKAFVKKWLEIKELEKYYQFDIICEINGWPRRTPRVFPAEVHELIKRHRELLEEPQDLHPKDLRPHVVVRYYHELQCFYDNSGCARISLLPLCISKRHFMTIDSTVLLKMLLNVVEKMGNQAPDWIKDIALYDNVCDDAIHACREEMWEKTFGLKKLKTSSKHRFDYQVDTDGISACFHFSHPKPPQPVDTSVDDRTHFLDAKRIISIDPGRTNLVTAYDSYFDRYFTLTRKDYYGYFRGSDRKIRLWEREMQPINTELSEFSLRSADPFKCQGYRNTYFRWYFTIWRSRLAFNRARESLNIFFKKRECLDKFFAKMRGPKDAPRPKVAYGAASIRPHAHGEMSAPVKYVLKACSKMYHTTMVNEHLTSKTHETCGSRMHPVKNEGEPANQSIRGLYWCPTCRKLVNRDRNAALNILLVARCIEGRPNHLAFGQPAVYMRKLTLLPPKKQKRRTGLVSS

SEQ ID NO: 820 - protein, 351 aa, synthetic construct
  REGION 1..351: note = Synthetic
LHDDRHECLFELLKNVASEAGPKLCPGWLVALSKTGLPQFGKNEGLQKTAWDATFNIDGLRKRRTFGRQIDTDGVSMVVHFSVTKRKRARHQKRIQRQPDTYKRIVAIDPGRVNLVTALDSSTDKIRTLTRKEYYSNARINRLNKKTSLWEIPLRGVVSALSKTSIRTSSPSLTFTYRQVIVRNYELLWRLRFQKKRAREALACYAGKQGVMDKFFSSFTSPGQEKPVIAYGASSFRSTGKGEISVPVKGVLKACRKHYRTQLVNEYLTTKVHHACGHRLKPIASRTAGPPVRAIRGLCWCNTCTKFVSRDGNAAHNILRVFKTDIRGQDRPHDLRYGQRKQFTQTLLKLK

SEQ ID NO: 821 - protein, 596 aa, synthetic construct
  REGION 1..596: note = Synthetic
KGTTEKVIKKSLIGTLKKKQLYDTISKWVSNASKTMNRGSLLFNRFLIHCLSNNLELPDFSLIPSEDSSTQNFFNHCFKTGKTGIRKSKSKFGIQTVWNQYFKSFPPLTTETGDSRTITWIAKNYSTVFNNSLEFNFESRQKRYIRHWLEQNNLNKNWIHSIRCAVNGWNCRTEPPLEAQEFISSQRRLLLPPEDGISEEWLKGNRNTILRYFWVILKYLETIDTAKKFTLAPIHTISSHFLMIDTTVLYYMSRDAGIIPEKLKYEEFNSQKQVYFREIFKFKESKRYIFTEKIQTDGVSVCFHYRLPKPKKEDIEIKKVEHERMIGVDPGRSNLIFGVEKTPTGLQTYRLTRNEYYCASGMTKRNRQASTWQQEIQEEEQVFSRVSPKTTNPLQWDAFLRDYISVYNRLWEVKTGKKWARARFRVFGLKKKVLDRFFNRMEGQVKPLICFGSSKFKPNGRGELSAPTTSIFKACEKRFKVELIDEFRTTKMCVDCDQSLHPVMVYSKKLGKYKEIRGLRRCSSSVCSQTSYKNRDLNAALNILRCESSFPRPKTLSRELSEEMPKVKPWYLMHASSTLRDKRPPVKVGCPTDVCL

SEQ ID NO: 822 - protein, 562 aa, synthetic construct
  REGION 1..562: note = Synthetic
KSTDEKVMKCSLQGILIEKKLYSEVQEWVYTISKVTNKASLLFNRIILHCLNNKLPLPNLSDQTFFMHCFNVGVGRLNKSSPYVKEIWDACFSQFPKINKCRGDTPAYAYAVKTFMTNFKNSIIYTFDGRQKAYIYKWCSMNNVDTKYFYAIRSAINGWGCKTEPPKETLEFINQQKSLLGRVELDGGITLTWLGTHINEILNYYHFILKYMEQYDDTRKFTLTPITRIKCHHITIDTTVLYNMMVNLELIDSKKCKIDNFLSIRDTQFQSVFNLKNIPNKGTFSYNIETDGVSCSIHFKVPKNEEKPISNKVLKKNDRVIAIDPGRSNLVYGVEKLENNKYRTYKLTRGEYYTNAGIKTANRKSAKWEKDIHNEELIYRQHSLKTTSETEWDKFIADYISVYDTIWNTKLQKKWGRERFRVYCLKRKTLDIFFSSMNGDVKPIIAYGAAKFNPNSKHELSAPTTYVSKCCMKHYSTIFVDEYNTTKICSCCDKALHPVMKDRKQIRGLRWCSSTNCRTFLNRDMNAAKNILRAFIGNNNRPQSLSRNSDIVKVKLKSLILY

SEQ ID NO: 823 - protein, 686 aa, synthetic construct
  REGION 1..686: note = Synthetic
FKGDERVIKTTLNSLVRSDKDLKENFGKSFTKKKFVAYLLGYVKTFSQSVHKGSILFNIFLLKSLKENSANLEHLDTNHVSNTFLSVGITKIKKNFVTDLWNTFFKGHPFQKNTPQEISSRAFDNYGTIYDANFHNSLWMNYKKRQSLYIKKWLKEKKLEYLTYFVQAQINNWPYTPRDDEQAKKEKNLDEDLIEFIDEQRKELGIIDDTRVSEVWLKHQDRKIVLVKYYYKILSYLEQFDDVKLFTLAPITKVTNMYMPINSWTLYHVLQHFLEENKILQKDTKLSVIIQKTVKENQDKMWNYVFDVDKIKKMKKSSNFTFLIDIDGFGTSIHYRKTKKNPSLTEKQLDTIERNKLKTKDMRVIAIDPGRTNLIYGVEMIKKGEVNKYELKKSTYYQSCGMNKEAAWKKRRMDEISKEELIYREHSLKTTNVETYMKFIKNYLKVYNVLWKTKTSKKWLGWKFRTYCLKNKFIDTMINKMVTNDPEVNIGKEKKKVVIAYGAAKFNPTGKGERAGPTSWLSKQFSKKVKTVFIDEFNTTKKCCDCKKTLCAVKDEITKGEIVRRKNIRLIKRKKTQFIVEDEKVDKDKAHKLKKVEIRGLRWCSTCRIYKNRDLNAAMNILKVFNHKVDNLSDLKSRPDYLSRSSKNEKTEDKMFSLLELRKRNAKAKNKKGAEHFLTTYAINIV

SEQ ID NO: 824 - protein, 771 aa, synthetic construct
  REGION 1..771: note = Synthetic
VPRVETTIACYLRTILPSDLHNAVETYAIVASRCYNRGTYLLNLVAMHLYGNRMPLATQSELLPILSDEFGRLGREEVRYDRATASDAADPFLRFIGEDVRNSPFKQAFLPERWPTASVHLHPTISSILRNEVHLPPEPTGWKFVMCATGWDNAINRMATKALGNFKVHSCCGLTKRTSAWLGCGRFFDEPLTQDTLHALQETLTKRPRPLAVHSDVYEMVLDLRSVLGVTETDKTWYPPDSPPYTSETAALHLFVTCYGPGERSYMPVARRSRKFSYVDHKVYSALKTALGKTSAEDPPARKRRAKAKGPKEEEDEMHKESISLGNSMGLTPSEFNEKRRDLRAVLQRRATERKRKHPNSPSARRLQKKRMRLGSGMMNRHAIIQSMETDGVGARLCVRTPIDIRPYVKAVEVVQPSEDLPSSSVSKGARSTRKRSRKEKSDERDREKEAAVLKARLESPPPITVGFDAGRKKLFVGAVCRDVIKKPETVTFTRARYYAEMGYWRHQTWSKARTSNSTVARALADVSVSGGYRNCDLDTWRSSLEAERRHEKVLDEEFVVSPDYALWKMRLHRKKRSSLDRNTGHVIRLATHGQSPERLLLLGMGDAKFSSSGKGEQSAPTSAVTEAFRRSMKKEMLRNPKRQILMENVSEFRTTLCCCACGSVTTKARVRSYSIDGGWENRESRRLRLCTRCEETGGKRRDRDVQGARNMLWILQHEYYGGRENRPWYMTRKGCCGNVASTCIRPMTSKAKRHAGAFSTSDRESAVKKG

SEQ ID NO: 825 - protein, 499 aa, synthetic construct
  REGION 1..499: note = Synthetic
RWVTRELALKPLRPLEAHDDDFAMAMDIREALGLRKDAYPESTVSLTAKALALHVFLVQQSDGGPKARTILPVAGRGRAYCYVDAKIAASLLGRPEKSRPEEDDDEDEDRGSTSGGELLDWPPERLQRQNAAVRREVRRKIRRSLRHGGPGDQKRRRRLRDRARRLGLGRIDAFARADSFETDGVGLRICFNVPTDEPLDHLELPRPPAPRPRRTRRAQAPPLADMVPAGAPPPVLVGVDTGRCKLLTAAISRCGRKKPETYVYTRREYYAAMGYHRHQRWCNARSSTGPLGDALAALAATGGLTGCRVERWRACLAAERQHAEVLAAEYLESHEHALWRMRLFRKKRAALDLAAHGLIAAACRGEPVDRPVLLGIGDASFAPTGRGELAVPTTALGEALKRAMKRARARVLATKVDEYRTTMCCCGCGAVTQAPMVWARRSGDPEPVWRRSGRLRVCTGCETQGKRRDRDVQAARNMLWLLQHEYHGASRPWYLCRGG

SEQ ID NO: 826 - protein, 800 aa, synthetic construct
  REGION 1..800: note = Synthetic
VPRKETTLPCYLATVIPNKRDQEQLDSYVIASSDAFRRGTFILNRIAQTVCGPRLPGGKVSSFDVPVFRPRFEDGPELQSMQSFIKLFGYVHGIEDCSLKHAFMPERFATLNPQVADAIATDVLLPGPPTGWREVMIDGLSGWDNAINRMMTRFYGNVKVQAMKNVKGAIEGYLNVVPLHTPEVRTALIDSTLYRLRPLIIDADDWAMAMAFRLPLITEPDFFMPKDAQWSDDVFLIHLFLTRFGVKERSYLPVGSMGRQYTYLDSKIASHLLEGAKVKYTASEKIAKQARLANNPDNPDKLENERAKVAERRVKEDVRRSLLKKVNATEALRREKFDKKEAESLANLDYVEVPKTPTLGDLIGMTPNEFNARRKKIVQDIRKRNIEKVTSKGFLSEKARKRFRKAAKHRKRIGYGKMCTDTRFDSLETDSFGVRLVLKTRINMNAWIVPITGPVIKAPIVKKPKKEKISKKERQIKAMNASEEPQVTDPVLKKGIVVGIDEGRAKLFTAVSLKRSGTPSIEKKASCIVTEPQDNCDYKSDKWVTTLLTRNKYHAYTKLKIRRKWEANRIKSNPELRVAYDALSLGSLHSCDPDSWDTRFRTESVHKSVLRTDLFEDKERERWKMIAFRKKKTCLDRAVGEFISVALKGEPKTRPLVVGIGDAAFPPNGPRGEIAVPTSKLATAYKRAFERVRKTGRRVAVFPISEHYTTKACCECGSITEPPLVKRTWCTRDGTRMIVDGESRRLRCCRTCETIGKLRDRDVQAARNMHRATIALVNGRARPAHLCRAAHVVDEPIVNV

SEQ ID NO: 827 - protein, 628 aa, synthetic construct
  REGION 1..628: note = Synthetic
MSYRINCVKTSLRSIGCSSSIQSRLRLYSIVASKIQHRLGVLMNMCAVYNKGNEAALREVASASQEVQKLRDIMLTSKNTPEVVKNTLSRLPSIWDIGPSDNELKLMSSWDQAKTYMANRFVANVQVHVKTHLEQRIKRKLRASLVSTSFDVAYKYIFASGEPPVHQEDKSVCDVLAARLRKMKLVNADGFTLPKQEKVPVDIMLFHFELAFDTGATFQPFPLANTVSRVHARVDERIYDKLTTGIPDAPSFQEFVRKRIRGPAQTTRKWTKHSFRWARRSRSAKKSGFRKVRRKKRAKIQCVKKGQKVVSFETDGYSVSLTLQTPHSCPAEKLTPKEFHKQHVAQLRDVFNSESGCWVAGNDPGRRNIATQAVLLSRDDPLVVPSTRVQFTRAQWNRVIRSKQQRAWEAKRRVGAVQVALEALSNSGGKKGCDEERWTNYIAKSLEHQETLHREFLHNDERPKRRLDGYGRRRKAVDATASRLVTSPDEKPLIIGYGDGDFCSHGRGGVDTSVPTKALFKAVQLAFKKKGVKGGVLKVWEHATTAKCHRCHNTLEKVYKTVNDNMVEDFDFRRCTHCVHEQRPKLRNRDWNAALNIRVVVMSILRGEDRPEYLTPDRTGRRRARVVR

SEQ ID NO: 828 - protein, 544 aa, synthetic construct
  REGION 1..544: note = Synthetic
GFTHKSIGTDDRREVEKLRRVFVSDEQSVEEGFPLPDVPTTDPSHEMVMLHLECCRLAEGTDGQFSPFPNAALGRSYHRLCSRLAELILKVKSFDVTFHLGCEASKRRGKRTRTLRHNRRKSGKKRNGHFSLGTTKKTALVSSIETDGVGVSIVIAIEKPMKEFKTTEREPKTEAQKRAFAKEMKQREIDRLAPLIPRAIVKGLDPGRVNLYTTATRNEDGSHDRRFYSRKRHLERSGRNRMQAWRDERTSLPLVSEALKALSLSAGSHGNDASKWMVYMNARRLHRVVLWDEFLYNEERCKKRMVEHRLGQRALARAADHLVSEGVLQRKPVIIGYGTGRGNGGGHKGEPSVPVKAMYRALKMAFKRHRLEGGILNVWEHYTTQKCHRCEHIMATRDVPWTQEDIEREEKKRRRKYDQGVAAAEREETPDFDARVRELDEMQLHPDPPLCSRQKRDRDFRVCEHCSTDDQTKKTRNRDFNAAINILKLTMCELRGEERPQYLCPQPVKKSVKKRNKKVKIVPDSSSHQTIPSGTDAPFEDPPL

SEQ ID NO: 829 - protein, 871 aa, synthetic construct
  REGION 1..871: note = Synthetic
LEDARTVVSISLKKCLVDTERCTLAYIERMVDATTWASQRTMWMANLVVLKCLENDLEPPALTRDFLFKCFQYSCQAKMRGAIDKRPFDYDTSEIHQAQRAKVNARLKIQGVSLLKACMVKSYQDEVLTPQERDVALAVAGGKTQKREQEARALAMCDEMFVRIRVDAGFDDLTIWCPDSARPSKTKSGQIVKGAFEVAGLSDQMEQVIRAELVPNAITYISESYRQRRRVYIEDVMSKFFKTKAHTSRVATHMEQIIDGVVPALLDGVEIDWTPVRGRIRTDKLRKSFEEELKLAESGDDQNRTFRDECVDVIKCMKSIPATTENLKKQPHAFLRPMHYIQRQRCDALDWIQQVAAEVDGDAVNKPNVDRNEAVGDEEDEESDEEDEGAALTEGLRYDIKKYRSVFALLPMRKGHASFLFLDKKRAESMGLPVSDEDSWSSTIFKFSDSLAPDRLNRIIHNSFRTDGVQIKVSLQRPGCPSDILSKRGFAKLHSRTSDVLELERRGVFELTNTHSLDHTNLLKRGVVGLDPGVKDVYTSVMNSTAEIQRRDSHHISNDEWSHLQRTRLIRRKDHGWRTVSGIALRSPMENSILTGLSLRSPKVGRYTDLLVAVKYRMLNAKTMWSYQMRRNRRVYRFSRLIATKSATERACDAIIHHRRVFPRVKDHKRVKKTRQRRRGRTRKPKESLHTDVKLRPIVVFGGGQYASGGNGLASVPRKALIATIAHKTVVCIADENNTSQKCSDCGSQLVHPDLRPLVNNCRIGRERKFTIPQKRRLRQCTSETCSGIRSQSHADGVRETYHKHWNRDVNAAINILNIGIEWWTHHRRPRALCRKSSDSGTQSSPNSPCIQPDITLHTSKKRKKSLSEQE

SEQ ID NO: 830 - protein, 839 aa, synthetic construct
  REGION 1..839: note = Synthetic
LKDCRTTVSLSLRKCLASVGTKANSDIVAIERMVAAVTWASQRTMWFANLVVLKCLEGERDPPPLTRKFLYQCFQYSCQANVSAARAARPHDYRPREMLKTQQVKANKFRKEQGLPPLKSPQDDETISKQVLDPDEVEVSNARAVHIMRQIADEFRLVEQCTADFEAVRVEGHFDDGDLWRPESAQPHMTKATKTQTSRPMIGTFCVPGLGTHMEAMIESEMLDNCCTYIQTTFVARRRLYLEDAIARHFPTPAHRSRVVTLLQSYLNDVSGTPLRPDTVIDWTPVISRIRTAALVASFETELSTALDGGLIGDCARLLAQLGQTLPATTDNLKTHPHLFLRQMHTIQVARDTVLLDLQEVMSKQAGDAEVEDCTLEGEIEQLAARLDYQDRIQYRKVFALLPNRGGQSAFIFIDKNRAAAMKTLQTDSVGRWYDNIFNLSPALGRGKMSKVLPTSFRTDGVQLKVGLKRPGSTSDLMVKRGFGSLRDRRCESIECERRGIFELNETVAQDTVVLQERGLVGLDPGRKDVYSSVMNLTEHANRGHHLSNEQWAQLQRTRMIRQKDRKWRRVSKIARLQSGGQSVLDGLSMASLRTGTFVSMARSVHYRLLNAQIISDYQTRRNRNVFRFSRLLATQSATARVCNAIAIMHHSSVLPRVPSTTRRKSRRIGNRFNPIVVFGGGQYASGGNGLASVPRKALIRELGHKTVVVIADEYKTSQVCCKCGTKLTDPDLRPFRRGIRIGEKRVFAPRDSRRLRQCQSEACCISESSDDDVTKKYAMHWNRDTNAAINILQVGVEWWLRGVRPEPLRRSTPTTPASVDSLLPEGILEDINLLSEQQ

SEQ ID NO: 831 - protein, 702 aa, synthetic construct
  REGION 1..702: note = Synthetic
RQRQIKTVPMSINSVITNKKVTETIDETVHLISRWCFHATLFLDFYIRYCIQNNIEPTLPGMSKEKEKKSYRESVVRSIMTKVLLRNRKERAATKIVLNHIDEVRKAWYAMLKDLNIQSPKIPSGVKLTNVITYVTKQYESTLWEVFDSEDVVKSHVKAFEKRPGHVKTPTLYRRVNDIMTDKESLITSKNRFDIAKWRLNMLDAIEEVSTDIREGKTFDIVPHAKSFRSFITIDSEFASSDCFKGLIDTPKEDETWVMKLFPNLSEHTPKGFCIPKTVKTDGIQIQIPYEKEILVEKTMSVKESEAHLWNRKDGKLVICNRDNVKIPSYPSVDDSTWNPEYFNNGRHKGLYSLREVKKLIKKNNIDVKKDVVSIDPGETNTICSYIPKTNTYFTMSKNTYLALIKSKQSRTRSNKAYSRMKKKDLRNRGWKHPEVQRAESEMSKTSTKTSHFELFCEAVKVRLSNLDTMFKFYGTRKQARLRFHRSILQQHTLDWIVNKVAPSPETIVAYGSGYNGSKETLKGITNGPGPVKKIRRHFAKKRKTVLTDEFHTSKKCSVCGCVGENPKRFQRYPLTKRHALEKDHPDMKCKGRLNSILGEFHCIQCRKSKNRDNNAAFNIYQAFQHEVTFGKRPKYLQRPKTSKKRKQTVDAVTTLGQSKNSCPHDSNTDFSMSPRGRQVTELTGVMAFFKPRVRASSQLIS

SEQ ID NO: 832 - protein, 609 aa, synthetic construct
  REGION 1..609: note = Synthetic
KVMQTSCITTKWSLLCKNEFLRDCLENIIVIWNKVALEAYQFANFHVLRCFNEEKPLPVLDQGFFMHCCNAITLQYETKILKDPSMEETKQLWIRNRQEAEITAVNIEGLSLLMTALPVEMCTASRNHLIVNFTSRLLRWLHLLWGLNRSEAWAFINEAFDAPQENRTSIQQGLVDFLQFRPSEFEIKRHFNHFLGLTFQFAKFMEERLEEAKDDHKAKRGVRTFSILPLKQSFVLSHIPLNNTTLYCIIQWMLKNRLNQRLRIGNQSWTANLSDAQFKATRNLFWHGLFNIRPFETSTRKFAYCITTNGYSASLHLECPKRKEDEDINSPFENSDEDDEDVQEKRGQSRAFYAHLNSICERFVGCDPGISNFYVGVDQDGQYVKASTQEYRDMSKMKQQIFWNDNLRRRFPQYDQVLRGMPSLHVTDPMEFLNRVRYILRHKDSLFSFCRQKGFRKWRFKTKRFSMKALVKLCKRVCDGMPKEKVCVGIGDWSRRDGVIKGHPTGPVKKWKRVMKTFANTLSIDEFRTSCRCNRCGHQCVNVKHKKRLEDGTFGWIKSHQVLRCENNECGTFWHRDFNSANNHYILLRCELQNQPRPVYLRRPNQGMI

SEQ ID NO: 833 - protein, 567 aa, synthetic construct
  REGION 1..567: note = Synthetic
KQLDFTGVVMKWNTLCKDEIIQREIEKFVWNINKVALEAYHVVNMHVLRCLQGNLALPTLDQNFFYRCCSGVVEKRGEHASAPDTGDIQLDATLEIFKSLRPKKNYMPPTKENMAFLMCNLARQMNVACRNHLVLNFGKRLIRYVRLKYDKSRKEAWHFINQAFHPDGEKTQEHIDFFQWLVYAPYENVIDKNYAHFLRKSYDMLQFMEAQPANTRGARTFTIMPLKGGFVMSHITICSSCLQQILQTIVKSHPGTSFLGHSNITKKVFDKQKDTFWRSLFDIDSYETENRKFAYEISTNGYAVTLRMQKPKREDTHPTLPSEHYFERVIGADPGVDYLLTARINTGEFVQISTAEYRDMAQMRKQLRWNENTKVHHPQYSQIIREMPSFATTDMETYQHHLRYVLTKCDELFAFCANKGFRKWRFKTYVYSKKALSSLCKRLTEGKRTCIGIGDWSRQDGIVKRHPTAPVKKIQKELRRYAKVISLDEYGTSRGCSCCGERCIKIRLPKKNKEGNIELSRSHQVVRCSSNECAMCWQRDKNSSINHLKLLMCLLRSEERPLYMRRS

SEQ ID NO: 834 - protein, 583 aa, synthetic construct
  REGION 1..583: note = Synthetic
RNVSFHIIKMKLSRFSKSSSFDLILKDNIKNMNKMRTLAYHLINFHILRCLKDNITLPDLQSLNFYYRCLATVSKLNNRSSKERENDELLKTYNPYMNTKDIETPYRDYSGNLINNMSLEMKIAVTNHIILNFTKRLQRYTILKYGIKNIDNLYDTTLYYVSNKNEQEIKDFVKIIPTKKNIKDNLNHIIQLEYEIQKYFDSLEPDTKGVRNFSITPIKGSYVDGYVKVCTSCLKDLTKTNKDLKDLNKDTLWRTLFNLNEVETCNRKFQYEILTDGYGVSITTNKSLGLELYQVDEDDKISCKCGCKVKKSGYKKHLDSSTHIKKMTTKRKLDDTEEQFDRIVGLDPGVNQIYSAVDQDNNFMNCSSKQYRTKSKIKHSVEWNKRRCKEVQETLDTLKSFKTVDIDRYKNAFEQYSKTYNELTIFYNSKAYKKWKFKTYCFRKKTISSMCKDICKNKKTLVGYGDWSKNQGIIKKHPSTPNKKLREALIRYKDCKVVSVNEYRTSKECSICHNVVKNVSKIHQVVRCTNNECSMCWQRDINASRNIIQKLYSENLGLNPPQVVAQPRLHATASRGDRDLLPV

SEQ ID NO: 835 - protein, 594 aa, synthetic construct
  REGION 1..594: note = Synthetic
KNIDFTCIKSSWKSFCKNNLLADTIVEDILPRINTICFLSYKLINFHFTRLLEEHKPLPEIKQNLFYQACCMVSQLKYTKDTTDTTTELYESFSQMKEYITDDLPARDYLCLGYITNLNKLQLTMTNNHLKLNFYNRFRKYLKLRTGETDNAVVYHWLKDIYEPTYEGKNTFILYMREWLKYTPTEANIVKYSNHFVKIYYSILKEFEKYPYTKGVRTFTLLPHKHGFTQSHITICNAGLENTLKYIAKKLKVENSDVESGLDVKQFAENSEKYWRELFNINKYETKNKKFGWTILTDGKSVVLQMRKPTQSEKPVSDYTEQQYDNFLGIDPGVRMLITSYDTNDKVIQVSTKEYRHKSKMIYACKKRVGWYKRWEDYEEWKLIPTIKTSKTSVMKEYFKYVFPRMRTFTEFHTEKGFRNLNFTSYCRSKSTLAKICERIGGKNVKTLVGFGDFSQQHGLVKSHPTTPIIRLKRELRKYCKVIGIDEYNTSKTCSSCNNPIELYRNRIRRKKMGVLEPIARMSNIHSVIRCKTNECKLCCMDRDINASKNILGLLLNQYKGEERPVCFKPEKIAVKPRKSDKRVKACDSPLLTC

SEQ ID NO: 836 - protein, 320 aa, synthetic construct
  REGION 1..320: note = Synthetic
MELFNINRYETKNKKFGFTILTDGKSIVLQMRKPKQPDTPIREYTEQQYDNFIGIDPGCRALITSYDTNDKIIQVSTKEYRHKSKMIYACKKRVSWYKRWQHYEDWKLIPTIKTSKTSVMKEYFKYVFPRMRTFTEFHTEKGFRNLNFTSYCRSKATLAKICERIGGGKNVKTLVGFGDFSQQHGLVKSHPTTPILRLKRELRKYCRVVGIDEYNTSKTCSSCSNPIELYRNRIRRKKKGVLEPIARMSNIHSVIRCKTNECKLCCMDRDINASKNILGLLLNQYRGEERPVCFKPAKIGVIPCKSDKRPKACDSPLQPC

SEQ ID NO: 837 - protein, 634 aa, synthetic construct
  REGION 1..634: note = Synthetic
DNPNFTVVKSTLNHFCNNHFIKSTLQDYCFQTNILLNETYLFVNLHINRMLEHNLTSKYKKLDETFFNNVFMGLNSNVKDETKRFKHTELNNTYNLYKESLPTDFQHADTKNKSQLLTEMALQLSTITGNHLKLNFYKRFYNYLKLQHHEIDCKTIYNIVNHILMNKTKYDESKDLEIKKQPLVIQYRTKFLNKTIDELLKLDVWIVLKQLREILIFNEITLLKEQEMKLDYKLRTRNARLFSMLPIKQLSNLSYMTITRNPLYYLLSTSLGNEFNTIQNENGKNLTNVKNFTETTYKQVCNEFFNIKYYETTKMEFHYFTTDGKTVSIVLKRRDYKPPRRKTKQEIEESKNEPKEKKKPIKKETKKKPVKKEIELNKKNLELIGIDPGLRMVFVGCKNTIDTTTNKNHIMKLSSKQYYNDIKSMRMTTKLNRLIERNNLSSLFSSTTPSRRTSKIEQLSLCIRTITEKLHKLIRTLMESKVRKWKFDKYRYQQKKIVEICKMLSGKTTPKEERNVIVGWGNWSNPNNSIIRGHKRGPVKRIVKELRRWCRVETIDEYNTSKKCSKCYNDTEKMKYSSPEGMRTVNDVLRCKNEMCRTYFDRDINGARNMLKKLKIKLGLEEQVVELTRTTIEV

SEQ ID NO: 838 - protein, 440 aa, synthetic construct
  REGION 1..440: note = Synthetic
MAKDMEVATINHLTLNFYKRFLKYLKLKYPLLTSKERYQICKGIYEKQYKGDNQLVIEYRKKLGNIPPYENNIKKDPSYVILMYYEMLKLYTEKGERLFSLLPRKGGFQMSYITIDNSVLRDLILEKKKPNKQKCDKVTAWRKDIEANYQIYWKTIFNVNKYETSTRKFTMLKTDGKTVSIILEIPERVKKVDEKQDFGDYDFSIGIDPGLRYTFVGYDSNQEVVKYSGNQYYHSSGVNETNFKQKRCYERNKGFMDYKANMPSPKTMDIEKLQSYVEYALKGLDNALNLHHENPFRKWKFKTFIKKQKTFQDICKKISKKKHIDDTSIKPIVGFGDWSNPRDCIIRGHKRGPVKEIKKTLHRWCKVVDVDEFRTSMLCSCCHHTTSKVKFDSKEINSVLRCSNNECGITIDRDINGSKNIFMLFSKLLKGEKKPSAFCR

SEQ ID NO: 839 - protein, 726 aa, synthetic construct
  REGION 1..726: note = Synthetic
TLKNYSTVSAKLNSFLRKGEEGFRQAIRDIIEEDVITMSKIANEGYMFATFYLLYVEKSKVAWPDIDQGFFDSCCRIVTASKQECGKKYPLFQDAFQEYSECRPEWRYTVPRNEYMTKLIEALARQMATNCDNYIKSTFLKRLVEHVQFAQGVDGSKGQRRKFVYEAWTGKFDKNNDEEGRHYGFADWLKECNPWDEKLMEEQRNMYLETLLDMIRTMESLPHDEKGRKTFALLPGKGDFQISHMRMTKACLLNILQKLNVEHQVELLKKVEERLKEKGKFAEAKIVEDYLKEKGKLAEAKIVEDYLKAKEKKKLNILTDSFWKRDEEIVNQIWREVFQVEKYETSRRKFAYVMSTNGYDVTVTLQVPKTEAELKKEREEKEKGKNRKRKADEEARDEEDKEYDAFPASCNGFETFIGIDPGRTNVITAYSGDMTLDRKKKSSCLMISQREYYSRIHQNDFNKYQERVRKGDTKYNTILQFMPTMKTGSFDAFKEAVRYRLLYQDTLFDYAAKKAFRRYRFRSKVYKQKVLDEICRMIVKEKSKQARKKEKRKNRKARKKRKKKGEKEPPAERKKQQDLTKKNMIGFGDWSAKQDTGFFKGKSTMTAPVKKIRRELRRYATVVRIDEFNTSQVCSTCHEKMKNMVERQIVHDETGCHFPSRKVHQVMCCKSTQCPKQWQRDVNASRNMYDLLMCKVKGEPRPACFEPLKKEAEGRQHQQKKRRRTH

SEQ ID NO: 840 - protein, 566 aa, synthetic construct
  REGION 1..566: note = Synthetic
AGTTVSVVKTTLNSFCKEEGKALPWESVLQDMNKAVLEAYVLANIHVVRLCQANLPIEPLNNTFFYRCLSAVVSDKQKFRDCEQLKQSAVLYNEWRATNVDRAKNKYISSGWQQNASLQMARNTSNAVNFNFYQRFHKHLKRKYDFDGRHVYGKMKRILDPEYDGDDPVVLEWRARIPRREFDGKLDSRPHLLLPLTYLFLFDIEERNRENKAAPDYVQIRSFSLLPYKRGFECSHFKMCKAGLWALLRRAEIKVPHQGTGWNEVADEWWRELFHVDKFETVNRKFAGEIVTDGKSVSISMRKPKREPVIRELNAKDYDVMWGLDPGRTDLFVASNQNGEKVSCSAREFYEDARYKKRNQKIRVWQENRPDVLEATRNMPTKKTSSLERLKEYVEFMIPRMDLLLKFAMVKPFRKLKLRSYIFAKKKLRELCLKLTAQAGRRTLVGFGDWSNQDIGGLIKKCPAGPVKPFERMLRQYCRVEPIDEFRTSKLHERCHSPLVHQYSKRMCRDGVERTLKVHGVLHCKNNGCHGMTVNRDENASKNMLLLLQRKIQGEERPSEFCRART

SEQ ID NO: 841 - protein, 613 aa, synthetic construct
  REGION 1..613: note = Synthetic
VFVANAIVKMKLNSFSTKKQLNTKIRNIVLDMNQVLGEAYTFANFHLLRILHKKKEFPDVVIPVIDRNFYYRCIVAIGLNKCRGSTLDNELEESKKCFDLLRDPNIPKVVLSGHIQVLADLSISMTTMAKNHLWLNIAKRLLQFLSWSQPTMKPPMRKRIVDAILYKPTVPLTKLFPNKDPKEQEGLVVATELRAILTLTTSKQQGSSAHLLIPLYFHILEKTVEAKKVTATGKKFAGRTFTLLPMKNGYTINNIQFSTMALLGYIKAVKLEKFQGDGRDVDASKMLRKYFNVNLIETKHRIFGNRITTDGVAVSIFIKKKCALICPNKCPCEKKLSDLVKRSVLERDNPKHVRVVSADPGFTDVAVTRDHYGNTNSYSSAKYYEKALYNMSRRRINKWNETTVELTRAIPCPETDSFQEFRDFTKSYLLNLVAILKHRFDKGYRNMRFLRYTSKNIAINEICEMIAPRDEMNVVGFGNWNGGKGTPIKRRCAGPLQEIKLQLDKMKNTALLSIDEYLTSQTCSNCENKLSNMKAQHYTYKKVDGKMSKVDKGIEHIHKILHCRSRQVGKSSQKTPSCGTTWNRDVNASINILNLTFLLMQGLPRPKAMTRKC

SEQ ID NO: 842 - protein, 627 aa, synthetic construct
  REGION 1..627: note = Synthetic
SHATIKMKLRTFCPDKGIHTKINSIVFDVNRLVAEAYEFANFHLLMVISNQRMNNMNVCAPKIDRNFYYRCLLAVSINNCRNGTLGNDFNESIIAFDNLREGDAQHKIDIRSMNPIVADQSITMATMATNHLWLNIYNRITRFISWKYPILGPKWRKRIADAILKTPTIALTILFKNDTSHQAQLSMSICKTMRSLLPLQNSNTYASRAHFTIPLYEYILSETETSKRAFEVDGLGMRVKLLVKDNSVGIRLTKFRGRTFTLLPSKNGLTISYVAFSDMTMMGILKRMKKEAFKGDGRSVDSLSLWRKHFNVKMVETKTREFDCRITTDGCGVSIQFKKKSSILFPSPPINMEHPEPTSTDLKTLQDILSQKSDPKIDIRSVDPGFTDVATIASIKGTVEHYSSAKYYETAFYNLSRKKTDKWNTEKMDEVKSIKARDTCQVETFKTNIKTYIELLPSLLRHRMDKNYRGMRFQRYIGKQKAIQEISDLIAPPKKTTIIGFGNWNGGNGTPIKRRCAGPLQEIKFELHKRKNVFLEMIHERNTSQVCSCCYEKLTNMRSETKNGVKKVHKVLHCKSNQTLKPELRAQRCGTTWNRDVNASKNILELLLHMINGSKRPSVFMMPLKFR

SEQ ID NO: 843 - protein, 647 aa, synthetic construct
  REGION 1..647: note = Synthetic
ENPSTNCVKIIKMKLNTFLKDHCRGVLHSHINRYVFLGNRILGEAYALANFHVLRILTLNKDDLLSCFPANKAIEPDEIGRVLPSLDKKFFYTCLIACSSCKVREKTLGESLSESVKIFDSMRNGCSTEKSDFVGMTQILSDLSITMATMTTNHIQMNIGNRITEYVKANYGNDLKGFIPAIVRSLTSDIKITLEKVFPTSQQNQRSHKAKEIANYLRSFIPQGFNINFSSHTHKLLPLYYVLLNSIEQKRNEKCQEIKDREVNENVRLNDAKSKIRSRLPRTFNLLPIKNSFTLGYITFSNMTVLSMLKKLKIEDFKNDGRFLSKEEVKSIWGRSFNLKAVETRNTLFDCRILSDGYGVSIQMEGTTSDSSIRSNQNQKDETILNFGRRVSVDPGISDVVTTTDSNGVSQSFSSAKYYEHAGFNYSERRTQMWNDETGSETKSIPTSKTAKMNDYSRYVESYMQHLPGLLHHRASNGYRQMRFLRYTKRQKAIKEICDFIAPPGEMSVVGFGDWNGGARSCISRRTSGPLKEIKQMLQESPHVKYHGIDEFKTSQTCCACHNRLTNMRAYTTRVRRKRDTGGLLHEEKVTSLGKVHKVLHCTSGKLGDSLSCGMTWDRDVNASRNILELLTLELGGKERPKVFCRS

SEQ ID NO: 844 - protein, 674 aa, synthetic construct
  REGION 1..674: note = Synthetic
DDLDIMVVKKTLNSLCMDVSRQQICSRIQSMVLVINHAVAEAYLFANFHITRCLDDVDFDVKQLPHLDRNFYYRCILAVSTSNVRKDTLGQSLKDSMIAFDALRPSGYLKVDVRQWGQVIADVSIQMATMACNSVWANVDRVVIKYLRLKHPSLKKHFNKIVKAVVQYPESDIDKIIPASLVHANNIKDVVRRLRDLLPLPRGKQFNTRAHLTMRLFHHVLTELGEDLKEKTTKKRPRLFSILPRKSGFTISYVPISSMTLMKILSMGDSPLESFRGDGRHENHSMLWRKYFNVQGLETKGSRFDNRILSDGKGVSVQMKHQASEDVAVDNAGYPKDAILEDCQDASLRVGVDPGMTDIVTVASSDGRVESFSSARFSEAAGYNTSNRRTNKWNVDTQDLVKSIPSPTTSSMHDMQDHVRGYLSALPTLLQHRASRGYRSMRFFRYVGKQKTIEKVCDLIAPKAQKKTIEEKVCDVIAPKAQKTIVGFGNWSNQGYGISRSCSGPVKEIRKCLSRRQNVLFKNVDERNTSCTCHGCFQKLVNMKADSVVWRRVKNEPPSLINGAPTTTTTIEKQKTVVKNVKVHKVLHCRNSVKSASSNVRCGATWNRDVNAAKNLLLLLTTWMDGKERPATFCVPSSSPTPKTTVSGEANVGAQPTDPPGSVSSLQLLSSRPA

SEQ ID NO: 845 - protein, 614 aa, synthetic construct
  REGION 1..614: note = Synthetic
EAVMISCVKMKLRSFCKMPRLVSVLNRIVIECNQIMLEAYCFANLHILRLFEAGETLPTIDRNFYYRCIMSIGTSKVKSGTLGQDFQESILLFDSLRNENTPKISLNGYNQVLADLSIIMATMASNHLWTNLEARIDKYLKTFHKSLKPKSRREIITALVRTPKANVREIVKNPSAILIAEELKNLMRLPSALQSKKHASLTIPLYIHILRSFEKLRDSQDKKDKHPKLFSILPLKSNFTISHIPISSMMMLGILKKHFGHKEIEGDGRNSNATYYWKKYFNLNAVETSQRKFGNRIITDGYAVSVPLKRVSATCCQNNVQDSKELTKMINNGKVDLICGVDPGISDVVTTTYYESIEELKNRKSVDNLVDNLKTLEVASYSSGMYYEKSKINSSRHSTSKWNEETKHITENSPKGCTSFVERFIDYIMYILKYEKELLEHRMKYRGPRFLRHMYRDKIIDEICDLIAPKDKVVIVGFGDWKLSNKSPISRKTCGPIEDIKKRLRSRTNVWILDIDEYCTSQKCSCCHQVLSNSKAYSTTYTKDGQKTTTFRKIHKMLHCKYHHTDKKVTKDLRCGITWNRDVNASKNILLLTIFEIFGEMRPKAFRRSRKLKT

SEQ ID NO: 846 - protein, 605 aa, synthetic construct
  REGION 1..605: note = Synthetic
MGLFDQLRDNQPKVDATLYSQLLADLSISMATMASNHLWMNIESRIERFLVWKYPELKKFHKTIVRAVVTLPKESIDKIFDVDSAYKAEHAKARRLLAAKTVPKLVSKRKVKMTPEKEAKLKEAAVKVAKEAVQRQAASDVAGEMRQLMPLPGRKKFASKCHLTLRMYYWLLKQIEAGKADHDVKNAEAVLAGQAKSKPFKGRLFSILPLKNGFTTSYIPISSSFLLVLLRSLKLSDHEGDGRGLDFHKVWSKFFAVSLVETKKSRSFGCRILTDGYAVSALVSCKVSLDTSKGKSDVGIDSMQAVLAASAAKGTTVRMAGVDPGFTDIVTASFNDGSKTVSYSSSKYYERAKVKHSTRRTCAMNLEEKVTTDTLFGGKTADPEQMREYIKAYLTHLKRLLVHRMTTKYRKLRFLRHIYKQVTVREIVDLIVGPETSEKVTLVGFGNWSGGSRSPISRQHAGPIQLIKDKIGKRMNAEIKPVDEYKTSQLDSNTYCPLVNMIATSKVRKKDGSMVVRLNNKVHKVLHCKPSDNCKLTCKETTWNRDVNASRNILNLFLNELTGKERPSAFCRPVKKDRSVGMSVAVDPEVMNPEHVITFAPTGPL

SEQ ID NO: 847 - protein, 487 aa, synthetic construct
  REGION 1..487: note = Synthetic
LEAVFLSSREALRRVNDYNRLLAPGERHLLLRTWTLAPCSQVKRLHIELDNSALDDFIQGFGLRELVRNESDAELPSNAEVVARVFIQKHQQSGPSNTRIPACHISTDGFSLSVLYEDKVVEVEGGAEVGGDDEVDGVDGVDEVDEVDEVDEVEAEADAPGDVVVGDCAAAPSPARAKKAVGSGKRKGKRGKYHRKKKKKKKKPSWVEVTRDEYPAEPIVIGLDPGRSNIFYAVRMTDGKVFKLTRREYYHLSGINDRKFAMARLGEGLEPYHRQLSREGSLKFGRYEELIAGLILRTQYYNEAWTLYGKNPKRAKLAFKVYCGKARTLQQKLNEFGTGLTREEKKRIVVGYGDGKFPSHGPRGELAVPVKRPRRMCGYTWHTVDVNEAYTTVTCNEPHCREPMVKVMTNIPYYDRSGQIRFKENRGCKRCTSVICRSEHPFKGRDHNAALNIGEITIHMLEGEARPECFTRAYHDARRPRRDPPAA

SEQ ID NO: 848 - protein, 776 aa, synthetic construct
  REGION 1..776: note = Synthetic
SKKIESNFTIKSRLHAQSDQIHDWILHGVDTVTSCAIHVTRFANMYLLHCVDNHLQLPIIDKPFFDRIICLITVDAEENRKKFADPQMRASFEQIYKPLLPKDFAIDRNSRDRTFLQRLGLDLQTNSRVYLRTQFLRRFRDWCKQCLYEIIPIDMSGKKSDERSEKMKQRWKLVTFLFQETACSASVVVDVALIKEDVLKLQETCSMVMSDEVALKLAEKIAETRQILSGTVDYTKTKTKIVNGETVIETVENKVLCRPITHRKLLNVDFSPFYLIWLVKRLKQIEKYNEEIGENGKQKKVYSILPISSLDRRYVSIENTALIAFIHSNRHDEEAVGKEIFAKMKENDCSNLKKTTNLFSENELWFWQQCFKFKANIGENRHFKCYMSTDGVGCSALYKKSAKKLEKEVEKEDDEKGSNELITIGDETETNKRIRVFSKEELAESDIIAFDPGQAQLFTSVIDGPENEKNHVESYSPAKWLQLCGGAKAKKKREKWVKSVQGYEKWLLEMPSCKVGTVAAMQKHVTHLFAFLEKHLVENGRERVRRLRFTRYVTNQKALSSIVNDVVNKPKKAIQSTKKKTIVVYGDGKFQTRGPMRKVYRELRRKENVTVVDMDEFRTSKLTTCCAFPKQRICEGKNKVEAKAVEREGPVGEYYDKKGEFQRKSLYSVTFCQNCSCIWNRDVNAALNMMRLFHYAQENRGARHLFFKRENAGVDASADASVDAKESKVIPEKKKKRNDAKEKTVKSKADLGERQALPVCKSSSNPEVGKKKGVQN

SEQ ID NO: 849 - protein, 818 aa, synthetic construct
  REGION 1..818: note = Synthetic
KKTHKLTVKCFLGGYQTPGKKKSRSNNPTWKGLCKQPVMAAAIDRAVQYISSVTIMASRLLVYHTLRALQANRPIQSSTDVYNDLISKVFIAAGNIVKRQGGAGTYHKDNDIQESAAAFANLLRTSTIDGEHIQYPVYESWMADVQSEAARQFAVNVKNHLLLNTSGFVRRFIAARISGLLPDSTMSTRKVIKSATAAAYKSLTEQTRFSETIQAFRRLKNLPQAELNIVQNIIDDIEPVYAPIRAGDKTLWFWNHTRLFHFILAEIEAINEDSLNRRMVHDFMQSIVDRICEVDTLMDQMLSEMEINQDHTMSSDAIELDNAQPLNIMQYKVFDILPISKLRAKYIRLTNTSLAALVHQLAQLSKTGAPLQRKTRGHGVPCDDSDIAHFRAIVEEANAQANDPSASKEDRMNLYWSKCFEIRRHERSNKLKFANVLETDGIGVSLTMSKQKTDAELAIIEKKAIVAADKKRHKDENAARRAAGQQPINRKKNAEEIALQQIEEDAKEASLKEAAQLLGFSKDEDGVWKIKDGAFAPVGIDPGKKKPFTCATWSAAAEQSLWKQDGDKIGSPSDENERFSMAEMSKSEYYYLSGFNQRAAITNNHIEACPRVKEYNQGGALSTKSASLHQYEAAMIPFARIYNTAMELYSTSRWWRRLKMGTYIKGQKTMEIILERITKQRDPELQKKVVVAFGDASIGQVKGCAPVGNKKIRSFIKERTCCIYTSEFRTSKCCSCCHKPLGGALYKVRRCRNNVCHRTLWGRDSNAAINILFRLLWEIRDEEIPGVFCRGTVLEEAEEDPVEEEDNTRVEEIILLHA

SEQ ID NO: 850 - protein, 770 aa, synthetic construct
  REGION 1..770: note = Synthetic
KDSITRTVKCCLAPTTAGRRGPVSLLGSAVLDGGARPKVPFCVYSEIAADIESAVVVMSELRIRANILAELWLRRCVDAGVRPVIDQNNFFVTALRSCLEGCGIRNYRKKASTDPVFACLVDAYEGPFVSLFSDVPGGYADLKMPTGTGEMVPAEALTMATNHATYIERTLMAHVVRYAMLKLERTLPSPQTTGKRRASLAVVVKRAIGSAWSTDGAPKVHERSVETILPRFPRIAEAAAPHTDAIQRVVDDLWDRLSECGPMPLDVRRASKNAGDYAAFRLHILGALETEVDRVRTAVEADAIPKAATDEDVEECELESEELDALLPRKTQRPRRKLAFALLPVLKYRAAYVSVVPSVLRNMLRRYKNVSAEATTILRLTEGDDASLFAWVFNVGRVRAPLGAGKWTVVRVATDGVGCSVTLQRAPATPAEAADVAVQNAKSKRKKLAAERSKAAVEEARATFAAGGFRRIVGVDDGKKAVVTVAEHSDTDVVERPGAARHAMTTVSGREYRFEMGFDRRMGLTKSWTATAPAVAAFNAAALSPRTADTTRYEAAAKVLVDALPALADFYVTRRRFRRLRFGTYARGQRGLQRMADKVLSPASGVGSRGQPTALKQQGEEKDVLVGWENASFNGVKGCAAAGPGRLKKVVAARATLVDVDAYRNSKVCSHCHAEMKGLPLHDLRDAFQNVVRADGSRLVLNTVSDKIPLLSRTGQRVRSYTVRLCTSETCHRMLFNRDTNAAINVRAKLLMMLHGVPFPDVWTRGTAVV

SEQ ID NO: 851 - protein, 653 aa, synthetic construct
  REGION 1..653: note = Synthetic
RFFEKTVIKMGLRTFCKESRLIGLIEKAVQVSSQVTWEASLLVSFHVLRCLESGIDVEPLEQSFWDRCISAIANGDKGIGMNASEELKESFRLYAQLRPHEYVPVKREGYMNHIFLGLRQTMLTNFKTVFVETFHGRLCRWLRLKVCLSDRERLKHSNVIKSAIALLDRACTNEEGSVESLWPTFRRLEELTSEDIEWMQHLVDDVRQRMSGPLPVSFAPDDMPGYFPFLRDMLKDIEDHILWAKDNEEKSISGIKLFSILPQKKFRAPFIDISTTVLKSLVAVLRGRKRKKMEDYDVTQETANILLESGTESELWNEYFDVKSMVKAGRNQRRSFGHSVKTDGMSVSVVVETPRKIPLPLHPKSRKKQLKQEEAEVSVQIRQKVLKEIKKSEKFLEETRVVAIDPGVKAPFTAVVYNPAAIERLSQPHGHNVHFSSVSWKASKYYDECGITGRTREMRKWTNAAPPIRQFNETVATAKTSSTEAYAERCRQVLMALQTLLNFYVHKRRVRRARWFAYGRKQQATEKMIEEITATKDHAEQRKVLVAYGNAAMHNVKGTKPVVQKALRRKLARRCLLVDVDEFRTSKLCCSCLKEMMGKLVNGDRLHQVRHCENSACHRIYWNRDLNAAINILCKCLRFLWGQQDPPQFSRTY

SEQ ID NO: 852 - protein, 636 aa, synthetic construct
  REGION 1..636: note = Synthetic
ATREFQVWKCGLLSICRDPNMVACVEECAQSCSIIAVEASLLASMHIMRLLDPDHNEGGEALPVMDDTFFNQCVSSIANLNGQQHGNNNNPSLTATLYYYYENIKPQGYVNVGRTPAMAQMLVIIAHQARQNFVVSTEQTICKRLSKWLKLRIRQHSVQGDYFSINGPYNGKSIAGLMMRCCLQDIQVAGIMNQYKRIRERPIPQHQIVWMQDLCNDVRHDLEITPQAPLEVSKHPEVYMRFLRRMLLDLENSGEPLRLFSLLPQKKIQPLYITINSTILKHLHKYLQSFEDDPLEVDEEVISLWDYYFDMKRFTRGNNQFENIVSTDGTSASVTVSRPKSAPVPAVLSARQSAANAFTDADRVVAVDPGRNPILSGVVYDREAMQTLPHPDNIHHEKVQWSKKEHYHEAGFNNRSYKTTMWMSKSPEVVQYNIDAISSKTSILLSYMDHAHHVLSNLHDRMAFFSSKRFKRLKFKTHIRTQKAYEKVVKKLKGGVKKTLVVWGDAQFPSAGRGSPAVPTKTMRKKVGARVKVIDQDEFRSSKLSCCCHTVLSNLLIDGERSYHVRVCQNVLCPRSVWDRNVSAAINILYLFINYNVHDQETPAAFRRGGHDPPPVPVAEVVAPGDEELGMDLDEE

SEQ ID NO: 853 - protein, 884 aa, synthetic construct
  REGION 1..884: note = Synthetic
DNGNLLVVKHGLLKFFRDPETAPQWTDAITKLAKATSILSYHVAILHHMHFLRMCEAKESLENWDQTTVDHAFFMVSGMFPGAEAKGLKAHGGLKPTEDSMKLLRTYKDHFLPIFGYIDAGLKRAGALKLTCNSARVAYMTALKNNISTTFYSKHLKWIKMRLLKWRELKQYNGRLPKVAYIGIGKAAYHLAKWTMDPSVYLNDRITLMKEQEQILFEKMNIPTKLRAGFMVHIKDMLGTIVQYVPYQDKKIDDGLLQQDWSGYVQWFHKILIDFDDWLKYAEEKEKAKKWDQAEKNRASRKIRRFNLVPQHRVGIRHILIDIGTLRALGIQLKVWKKSLSIKTMRQDLPTYWNQVFKMDELLSHQVRKGKCTPNWSISTDGVACSTSFARPKLLVTNPPKKRNKEKIHFTESKVECKLKPQSSKRKLIADDEEDDIVIRRKVKRDSLPFREKKSSDSSETKEEKKNQIVVLNYDEEDRLPLVLPITIPLHSIIVGLDPGMRSLYSAYSPHISGEHKRSNTDGRENKEEKQAIQIKNTTIRQTGFRRPSQRICINQRIHDQSVNEKKKGKNGIHIDLSSAFFRRRTKQHRRKRRLEGKLDEWITEKQLNPKDVKNSIQSTKVWSLDALVNYWIERHELLASQWDFYSEEFHRKEKFDSYIRHQQSYTWACKRLLEPYLKTISQEHKKAGAKVVIAFGMARFKGSKGLPRPGIAKFYKCLSTQFRNHCIVVDTPEFYTSQKCPQCHGFVSPVQSNHSHESNGEMKIMRKKRWSSKKRVWMDRPPKDDEKKLKKEANHEKTEEKICNVCRSDQIYGLKACTTCKVVYDRDNMAAQGMWAALVGVQETGERPSYLWRSEGDAEAKIVAAKNIWQIQDRPKHVLERHL

SEQ ID NO: 854 - protein, 613 aa, synthetic construct
  REGION 1..613: note = Synthetic
KKNITSVIKIGINKFCRYPEHIAHVKQFIKPTTQVLYEQTLFINYYVLRAMELNHDIIDLSSQTNLNRIRYLCENRKQQNYTKVLDDIKNPFLEECWILWKEQRNNTLPFGEQLITSLGNAYSVNTITMYKNFFTMRYFSFMLKYARYLFRNSNCTGFTSKQRSYVAKRIIQQFEHDKNLPTFTCERLTDLVISNTDEINSIHTELLKYLPETQPNPLNGNTIKNNWTQYIKPWYNLLKVFEEQNLVTEHDYKFTLHNILPMYSMNAKYVPFTKPILFKLHNKIAKSKKYKKIKHVATQKLYNANFYYYASKVFRLKHVENKNGKHFFVGPILTNGDFVSITMQKLPVEDTTNTPITKINLDNKHVIAVDPGIKNIIYSVDKDGVTCKITNKEYYHYLNNKKRQRKHENTYRRNGIDLLQTVSSKTCNLNIYKLFLRDVYNSLHTQLDINCSHAIKKLKKEAYIARQRTYTKLMSKFNNIYSSNKKKVIAFGNGSFQSSMKGYTTSTYKTFKNKLNIGNILEGVDEYKTSQVCYNCHKEELGYIYKNGLKQHHVRVCNNKHCRMTVLDRDLVGAKNILTVYVHKNEHNNQVPYCFQRSTITSCSNDKILLIQS

SEQ ID NO: 855 - protein, 519 aa, synthetic construct
  REGION 1..519: note = Synthetic
GETQPLPSLEIVPQIKTYFVKDFVTNIRTHVKRQFWLLAKRNLMAVFRSRGVNDKHARKIAATIVTSALERVTSDIEEEEDDEDLALAMTLDVGPSDVVDDEGDEEVDAMIVDAPDCGEEPDAFEEYIESLSTTFNAGFEDRLRYLYTTNVKNMSFGGKLSPLIPLYTADAKYITIDADALWGLLGCKAGTQLDKKSFGLEALNWWTKVLNLRKPLVQQQSYRRFSFMIHTDGMGCTVKVAKWVPKQPKMTDEEAKVKRREAAVAFGRAELRRVEGLEETGCNFVGVDPGRSKVVTVVKQTFPSAAEVEETVLELSNERYYHECYYNYRSRRIALWSSKLGVARWWQQQPSARYGRLIDTLENVRYIFSGQVDKIFALRLSDKCKKLRWKVYIHQQKTFERFCREMLSDLPSDKHTVIAFGDGKFPTSSRGYAATPRSKKLIETLRRLKQRARWRRYNITVLDIWEFNTSQVCSKCHHDEALKDLRGATKPHFVRRCQSCRTIWNRVCNFAVCLALSLS

SEQ ID NO: 856 - protein, 633 aa, synthetic construct
  REGION 1..633: note = Synthetic
KLEKITNQKCFLSNFCKSSIVFDAINKQVIEMSNFVIEASIYCHYKLNTYLLQGKVDVLLQSSRFILDMFYELKQKSKAKYQLEPDYEFIRNDYNLNKYKVVCGNSMNFLATQYETILKNNIWMHAYSRIRKFFKNATKVDAHVYTPTVIYQTLDTLFNKKSQHSTNEYLIELLKNELQFDIGNFHDIEKYPLKYIPLFYNLQKYNELNNIKNFKLFPQITAGRKYIRYDSFALFSLLASLKLLERGHTTWYGFAPEAMNYWRKYFKVEKFETGNKKFGKSISTDGIGVSIQLVREIIHATIDDDDDETMKKKRKIKKPKVSYQQDYNNLNLDDFTRYLGIDPGERLMLGGIIKNKEGVFTPLKCKSTTFRYDTGEISRRNRLIKYTTDHDIKQYEKEHENITQTNEPYNKVSDTMQKFINDSIKAKRKKKQKPSPKNKSLLDMENINEKLKVNISYNPSNYINYTKWRLKWLLYLQQLYCKKKVARLKMEAYMRIEKTLHKYKEQLAPSNEKTLIVWGDATIAANSPVKGYIRTPKNKLLEILKQNKNCKVLMQDEFRTTKLCCKCHEPLNISTDKHRYAVCPNCHTVFNRDVNAGANILKLVITRLKKEITHKNFCRSVKLTTITGSSFIV

SEQ ID NO: 857 - protein, 617 aa, synthetic construct
  REGION 1..617: note = Synthetic
QSTRAVKMQLTSSLSDDTLIPEILDQVDRFNSITFHGAKVLMLIVGQCLNQGTPLPAFNDTFIRQVFASCSVDAHGNETLVTNPVIQNARTAYRNVQAHGFQFTSKSHLTQAITLEARSYYVCLANHVVTNVERRLVRMLKHKMRFDLPIVVRKAYRTDLLAKHLYKKMQEGARTLAQCGIQQIQDLDGYLKDEDQPRPAQATHQVFAQIVLDMAQIVGNQSLDPSVIGQGHNWVQYFRLLRRLLQTVEQIGPTRRNRLRLFDLVPLYGTGTRHMAVDTDALYNLLRQAGHRLVQGLNKTTFGMDNLNHWRALFDFSKIPTFSGLIQTDGYSVSFVCKKTRRPDYRKRDWEPVPFWWLYTMKVVGLDPGRKDLFTTVGSVDGNPEAVVKCSTGRYREMAGFTRSQTTVKRWKENRERLMNGPSVFHCELDLKDNLSRTANMQGLLNHCRASGRVYSTLHDFYGSMRMRRLKFQNYRGKKRAMAALCKEIVGRNSGQFQKDVIVAFGGAQFSSSSRGYAPAPVKALYRELKKWCRVRLVGEYNTSAYCSADIPGIFGSKPCHTKFQRNQPNFFVKHCRHPACGMYWQRDVNAARNIRWVFRQMCRLGTKVHPLPFRRA

SEQ ID NO: 858 - protein, 557 aa, synthetic construct
  REGION 1..557: note = Synthetic
YQRNLVKNWIITQANNNSKIIILATRLLWLHIVRLLSQDNPLPKINQTYLLTFFRHCSAPSIPKVDVDLQATVNLLGWGGLAKPQWNLQICKYLANEYLVNLKNHAKFNYWQYTIKFLKWKVGLLNIDKKIKKKLLGSIYAIMKHVYSNQPYDINTFSEDIRQYVEQFTTCLQQLVSRSRENQPDFYLEKITFFYLLKRETNDTLDIKIIPQSSFTRKHITIDKKVGEELLKVINLYQKDLSKQQQFSILFNYKPPPNYQVNIYKTDGVSVSITLEKQSTMDVCEESIINNNIIGIIQQHTTENNTNVFQPMDVDEPVRIIGVDLGRKDVFMLINHPEKNQCTVQYWSCKRWQFESGLTRCNRVIEQWKEKDHDISNLEEELTHFVQSSEADRSRMHWQHVYDNIRVIENFYFRQQHYRLRFWMYNRRQQALHKMCRYIGDRTDIIAIGNPEFSSVSRGYAPTPAKTTVRKLQQLFPNKVKLIDEYNTSKLCSNCYLPLKFTKMKMPGGGPNYRVQRCNRCSMYWNRDVNAARNMRALFVYEQENHNQRMLQFERPN

SEQ ID NO: 859 - protein, 706 aa, synthetic construct
  REGION 1..706: note = Synthetic
SEQRFLCIRTRLSSVSRSPEMSTLLNTATIELSRASTAAMRILQIHVLDMTQQGLPVSITQTMVKRCIDIVGGVEAMGTKEPKLSAIAGSHWKAHLGPDYKTPNIMLLGANAKQYIAKEFLTNIKNHVALNFAHRHKQYVTSIVGRWCDEDKNTTPTDRRRAIRTVQCASLVKTHDLRIIREQVIKKRNQFDGCDKAKEKASGNQTTTAGRKRKRSEVDKEEDIVKEEVTVKEEVTVKEEENTGKKAKVKKKDKIPTWLECHEDDLVAFASRVRKDIGIEKFSGKSIGSHFEEYFRFFWIVQKRQEWEQGQEKPLRGFRAMSLIPVKAMTATNVTMDNEVLKYVHTQHMKNTVSQTMKDAPVEDLWEHYFNMKAIRRTGWKMDTGIVTDGVGCTVRLKRPLQENEQQGTKANDDHIFRWRQVDALDSKKVIAIDPGRRDLFSACTVKLNGANRVESRHLDNNNNNNNNNNNTHCSNKEYRNMAGFRASERRHKRMLAKNPDIAAFYKDIPSMKTTDLNQCKKNLEYFAANHAKATAMVLSRDHRNRHFNLRRAAQRTIDLLCNRILGTSDWNKYKDIVVAFGSGSFSSVSKGHGPGPTKTIKRALARRCQVIHADEYNSSKLCSSCGSKLTDTPLPQHARAFIQPKLSWGLRRCGNNECESLYWNRDVNAARNIGWRFLCEQKGLEVPKGLKRTREDLLYEDPPGG

SEQ ID NO: 860 - protein, 849 aa, synthetic construct
  REGION 1..849: note = Synthetic
RTVRKVSCLRQLNGNLHTKRGAIQVVNHCVKAMTYTTIVGTRVLNNDTHLFLEGYRNVEEQERQLLQEFRENNIQQLIQQQQQQQQQLYQNQLQQRQMLADQQNAEQNMGQRMEEVHQGLQQWLQDEQMTQNGILMLEHHAQLVQAYEGRADALNGLQVLQKERRQTDAPHINQTGIRQCFKHLNPNAQASPEWVNEAYCKTYGVNNVDDVPSLPDRDVYRKVYLAEPINNAASQYEVSARNHVTTNFYGRLISCTRIVATQICPKLNKGRNKGRLNQVVYYTARLIMEGVNGEPGLSGDAIQKEVAIAELNGLLQNFLGDDVETKEELIRALWQYAVEALNKYGTADDVYQRLNQRDFHTLLHWLYQMNHEIGNHNGYIEYLRGIAEDNRLAGLPFDNVGWLLKFEKNFTMLPIANTNKAQHILLDTRAAYYLFKDVYNLDESRDYYHDNPGVLWRKVFNLRGIRKSTGWKFANYVTTDGVSLNVHFSKDMTQAEADAARAAAAQNPFRRRSNTTPWHLFPLNDDVDPNNVFGCDPGSKDFVTSVGAKDQDNPPSKKKKFQPPSRQAKTHNKKKQKKNGHRRSRNRNNRLHKHGGRKKQNCNNKGERFFQCSNRHWTHETGSKQAAKSSLQRLALTPVHYVADGFWNETTLYDVKVLIPTAKVVTSQEFLHHCHHVFFFLEDIVNDLMVQKVRRERFGRYMKRQAALDMVCHGITFGRDNAIVVFGNCTRQKSHFPLPIKELIRHLQHYKSTTVIIFDEFRTSKCCSKCAFNQDLGERRGNKMFGEDTKGGKKKGYWPIYGVRVCKNCGVRWNRDINAARNMRLIFLHMVENRLPDQIPVRPFPFARP

SEQ ID NO: 861 - protein, 879 aa, synthetic construct
  REGION 1..879: note = Synthetic
HRAVNVSLAQLKPSKEVTEMIERWCCCMQDLSVKATMLANQCIVDEKLTPEEASMYFQNISWWEHHMKIWTTLSRCEYAELLTRGRDALMARKPFELLHAKNMTQVINFAATQMKTMASNMMNSRYMPSVKASFRRYVILLMREGSLQMTSIERHAFEKYCMDRFKEIAFPGMASGKSSPSSKKTDAKKTAAVAKASTMGPLYDQIIAKWEAAVPQYFKWCRQRSSVQGEVNIFKDDLLMMGKYEKLKELNIINSKNLTKDQKREKGDFSKELNKEVSAHRRSLSEKIDKDEYYCRLLFMKHLHANKQEDGHRMRALDDAPSSSLHKISKDTKKAFWNSCKAGLLLPLCGYDVKSIRLDARGLQCLLSEVKAEEKARNPLTTEKKRVSSSANTRVPKKRKCRDTKALDEDIVVVVSDEEDLDEAIDAEEDGEEDGEVKPDGGASSSRSAPKAKPARRVPSAEESAEAASKQRALFVKTFPGLKTLLSRAGSGKGDNLLDKLGKSLCTNGICASVFLQIPKPDVVKSDSADADDFFKRRKDYDLASRCPPQKLLPGQRMVSIDPGRRDMIVAYEEGSKKHLVVSTAHHIRKSWRSATTACTLKEQRKVLLTEADFQRYIGRLDDEKKARALIRRERGNPLDLAEYLSKSPTKACDATSWSTYLDYVWPVIPERLEAFRNKSIRRAKFKSYSRIDKSLDEICKKICQLGAPESELTRQIKHRDHRNQRTFRGENVLVAFGNGSGSSTGFGYAPAPQARLRHRLETVHKCRVTLIHEFCTSKLCSSCGNEMVYVGEKTMAEHHAALAKKGMNVDVGVTKRPIHGVLKCLECNISGARSDFGPRKHWHRDVNAAINIGKIYTCLAKNGNRPDYLKLPGDDGED

SEQ ID NO: 862 - protein, 728 aa, synthetic construct
  REGION 1..728: note = Synthetic
NSCVKCSLSGLGCSRVLRGAIDDLAVRIQLVAVRGTHLANHIIAENICARATSEPLPNLPDVFEPKWWQQCFKAAADPQSGGEGDLHLMSAQLFADGDVIRLGHAGTHAIETLAKDIVTNIHVMLILNFHKQLRKAFRRDILCYAAERDFAFVAADRERLVDYCIWRCVQQDSLCEEVNFPLADCDPMEFGIELQAELDSKVNDWRMLYGQVVLCPIPSFISNMKSSAQKMHLFRWFIDLQRQRKRLQEELTTHFVGDSETARKCFGKAAKAMRALPLTKLRVGHILVDRTLLKFLLLELRKAGEPISDLEIPLLNPVVLSLDENGEPLKKRAKLNDDGTEKQTRNRRKGDDDAHQTELFWSHFPNAKRLLRGRKDAHLYKSIRTDGISCSVALIIPGRPESKNEMKELKRIEKCCDLTPGNPIPIPRKPGQRLVAIDPGRRDMVYCYVKTDDADETPSTCSSSTSKFFRSKQFFGISTRQHVKEAKRRRIATATIELQKRTLLSSQVYHNVDLQFNLHSALCNLPSNKAFETYASYEAMMFPILEEAVRAMSARRLRREAFLSFQSKDKALDLICSKICGGVSVSKVQRHERPRVLVAFGNGGTVSTTGCGYSPAPQARLRHRLKHIWGAHISLINEFRTSKCCCQCGEILSCIFKKRNKGVILKKAVKIHGVLRCKDRDDGTRGHGFIHRDKNAAVNNMSIYESLADETKRERPLQFRPQRGSRYL

SEQ ID NO: 863 - protein, 684 aa, synthetic construct
  REGION 1..684: note = Synthetic
STSLKLALGRLLPSRAVRDQIELTVQTIQILALRGSLVANTAVINSLEAGRGCPPVHDTTWWRNCIAVCGYGIGVRGPDKTAQLTELQTIALQLFGWETYESPLQHDVAPNVEHPPVLTNDMASHMSALVNEMQTGCHNMVSSTFHKQLSKAFYREISIFCREGNVTFQDGTVRAITRSCISRTTGNTILTDMPDECPLALQQRLDVLVTSWSTTFADILPCPSPSFIENDLKMTKTCRFLEWLYALQQHRLACVQHMAHLLPPSLPPPGKSVNGYFYKKSSKPQALLPLCHAEVRHIQINNSTMVNLINAIVARGDLPHVYRITSKTATLQHYMTHFPGLRVFQNHARYVDNGVFTFQSFRTDGVSASLLFGPKHVHSKRRTSSQCDEQKQAKKRRKTSSKTSVDSTPSPLEGKRIVAIDPGRRDMIYAVYGTEHLVDGRFSVPTANFRQRCHTAENQALGEKCLKRVLLDDGRTLLTAMGSLPSAKDMFQWRTFTDAYLPLLTPLALAKRSRCLRRTRFDSFIRRDMVLDQVIKEIVGGSLSRQACESTWVAFGAAKVCSTGFGHASSPQARLLHRLEKVHKVKVTMIDEFRTSQVCSCCNLARLYKSKVHGKRRWVLESCPNCRNDAGTGPKILHHDLHGAMNIRKIFLEGVAGSGRPQCFTRGTEKLSNLPSTFHPVIMH

SEQ ID NO: 864 - protein, 268 aa, synthetic construct
  REGION 1..268: note = Synthetic
IFLNPAKYHLKLLERGEIRDFQLVKRCKKYYAHIVVQYEVEDRPVHAVLGVDLGIRRSAATVLLRPDRPLKREDFSVIRDGPKRQLLNWLNERAAELRRAKKWKALKRIQGKRRRIAEYFDRLTAKRIADISGNCLVVIGYPKWVRANNYRGNGKRWLRRKLTGWSYGRIIRYIREECAEKGIKAIESDERWSSMICHRCGSRNTERPIQSIIRCYSCGLIYNADFNAAVNIGSSFSAGPWSRGVQLNHPELRVIRPERSGSAEAAGL

SEQ ID NO: 865 - protein, 635 aa, synthetic construct
  REGION 1..635: note = Synthetic
GLQVVKTIKIPVHYDVTRRKLLILDRLTARTAYGVWVWSNLFKKHGLNGSYGDRRQFYEQVKREAKLGTMAQCCFDTAAWMWSSYREAHKAWRREVTIARREGEWKWLRKLLRREPQEPFTNGMQRKVPIWFDSRFGVIEKSKHIKLFSYVARVSTLRRGVKLTIPLNPAKHHLDMLEKGALKSFQLVKRDGKYYVHVKMESHVPTQPVHAVHGVDLGVKRSIASVMLRPHQPLRSSDFAIQTDGLKRDRLNRLEKRIAKLQQARKWEPLKWIRHKRLHISEYCDRLAAKQVAASSQNSLVVVGYPKGIKYDNARGNGKPWQRKHLASWTYGRMVQYIQQECAKQGIPSEASDELWSSQTCHRCGSRHTERLTQSIFHCWNCELIYNADYNAAINIGSRFLASPLIRQATDDLAYARNEQAREIVACEPRSPHPFMGGSKSQAVDAPSLRISIQDKTIDMAEIWKATFRLENEEEAKRFQDFLSQQLRQPNKSTASGTNIVIESPDENESFVAAHWSKNKNPVGPVLYSVKGYDGEQRVIFDSGCPVCRREKNAGKSRTAHWEHKVRGKQATKPSPILATAQQPVQRELLSSAKIAADGRIRLNSRVLKKLNVKRGQVLDIWYENGKVMLQRESE

SEQ ID NO: 866 - protein, 456 aa, synthetic construct
  REGION 1..456: note = Synthetic
MQVVKTVKVPVHYATTKRKLGILERLTARLTHGVALWSKLIEAHNIRARGRLRDRNLERKVKDRTGLSAGLVQCCGDTALWMWRSYREQHEAWLRRLRTAQKQGDERWVKKLLKREPQKPFSNGVKRKVPIWFDYRIGRLEGARDIKVASYVIRMATLKGGEWVTIPLNPAPYHIELLEQGMIKSFQVVKKNSKYYIHVKVEYEVPDKPVTGVLGVDLGIKRSAAAVLLQPNMKLSPKSFLIIREGEKRHRLDQLNRLISKLQKARKYEALKRLRHKRGHVAEYLDRLSAKRLADLSEGCLLAAGCPKGVKYDNFKGNGRKRLRQLLTGWGYGRIIKYVVEERAERGLPTEAVEERWTSRTCWKCHSRNTERINQSTIWCWNCCKYFNADYNAAINIGLPFLAKAAGRGAEVEPAQTGDEQAREIAACKPGSQHPSGVGSSQGAVILTISRKWCTR

SEQ ID NO: 867 - protein, 422 aa, synthetic construct
  REGION 1..422: note = Synthetic
LTKRKLFILERLTARLGFCVHLFSKLIEERDMRVTGFGEFTPHDITEIKQLTKLSISYVQQCRDQALWTWRSYHAQHREWETRLKHAKGKWREKLVKREPHKPFQTCSISKIPVRMDRRTGEVQASRKIRIAPVVLRLSTLQKNYRITVPLNPAQYHLNLLKKGRIIDFQLVKSNGWFYAHVCIKYDVPDRPVRAVIGVDLGVKRAMATVLLKPHAPLHREDLTFLTDGEKKHQLDKLNHRFAELQRHRKWAALRHLRHKRRHVADYFDRLDAIRIAEMAASQDAAVAVGYPKGIKYDNYRGNGQRLMRRVLQQRFSYGQRTRYILEECTSRGIIAEVIPEFWTSRRCHRCGSMNTCRPSQSLFLCFNCGIKFNADWNSAINIGSVLFAERLGPRARAGLAYAGDELVHKPASPEVKDIAKI

SEQ ID NO: 868 - protein, 509 aa, synthetic construct
  REGION 1..509: note = Synthetic
TKSFIGTVKVPVHYLTTKKKISILDRVTARQTYAVRLWCEIIRNNKLKSVSDCSPFEPTVEDQTELTAGFVQQARDKALWMWRSYGQQHEKWKWMLNKAKVGSKWHQKLLKREPSPPCTSKRSLLEKISTRFDRRTGQVQKANLALADGVIHVSTLKKGETIDVLLNPSEYHENLLDAGQIKGFEIVKRNGWYYVHVTCVFEVQTRPVQRFVGVDLGICRSASTVSINPADPKPQDFHIFKDGKRRRLQELNDRVSHLKRLEKWAALKKLRNKRRNVAEDYDWKLAKNVAKSCADAYVFLGDPEYIRYHHFKGNGDRTSRKLLQHWSFNRQTRCIQHECAKLGVLSEALNEWGTSSRCHRCGAKVERPKRSRVVCHECGLQDDAERNSCVNIAWRGMSRLGIKSPADLTILNGAGATVELARTRDDSAEKVDEPRSPTLLGRGSSQKTSVNTSVSSSKSLYLMCVYLLVKEHVKTNGKAREANQKNGRFCKGKNDWRSHGTRLASRLSS

SEQ ID NO: 869 - protein, 464 aa, synthetic construct
  REGION 1..464: note = Synthetic
MKVTRTVKIPIHHETTKKKISHQDNLTARLTYAVREWYKIIDENELENKSDCSPYESEVQEKTKLSAGFVQQARDKALWTREQDKESHKEWERKLEKAKEGTKWYKKLKEREPSKPFTSKRSKQKKIPVRFDYRTGSLEEADLALTDSVIRISTLKKGERIVILLNPGEYHKKKLKKADKICSFELVHHPERGCKYMVHVTYEYDIKTRSVDWIRGVDLGVLRGLASVKLPWTRKNFSIRKTDKLAEIKELNDRIAHSRRLEKYEALKKLRKRRSNLTKDYDRKLAKEFAEHTDGEIVIVGDPQEIRYRKFKGNGDKIGRKVLQNWTFGRLGYQIVEKCRERGTISIRFNEWNTSNRSYCCGEKVKSTGRRVECTNCGQNYDREFNSCVRILQTQQEFSRKILRSSEFFQNSERKASSYLENKSSEALERSQKLAGATDELARTMDDSGLEPWMSMEAHTLGCG

SEQ ID NO: 870 - protein, 408 aa, synthetic construct
  REGION 1..408: note = Synthetic
MQVVKTVKIPVHYATTKEKLNKLNRLTARLTYCIHLLSELIERYDIRSRKALRAKVKEHGIRRRTDLNAAFIQQCEDKDLWMWKSYRRRHHIWARKVKRAQHKNDEKWLKKLMKREPSPPFHGKQSVRKISPRFDVRTGCVEFAEKSKLAPLWLKLSTLELRETICIPLNPARYHLKQLRAGKISDFEIVKRDGKFYAHISIVREVQARPVKSVRGIDLGINRAVATVLLPKGGEPLEELWADEERKKQIKKFNEVVAELQQGKKWAKLRRLRYKRTNIARYHDWLLANRVASNSDGCIVAIGRTDYKRRMFKGDGDKQLRKRVHRWAYARATRFITLKCAERGIHAVTIEEAWTSRICHRCGSTNTERPTQELFHCKDCNLKYDADLNSAHNIASRCRVDGLKAGMI

SEQ ID NO: 871 - protein, 447 aa, synthetic construct
  REGION 1..447: note = Synthetic
IMQVQKSLKIPVHYGTTKSKINILDNLTERITYCIMRISELIIDKTKIDRPTIRKLVKDNNIVLKTGLSAGFIDQCIDKIIWAWNSNKRLHREWEKKIKRAQERVQSARDEKEKEMREKSLQKLLKREPSRPLFQKKTPCRIDYRTGKVEWGRGKCKFSPLWIHISTLEKRETIDIPLNPSQYHLNELKNAEIGDFEIIKRNKKYYVHISITKFVEDKPISSIGGGDQGLNRTVAVVLLTDPLPREEHLMDAAKRELLDKYDAIIESLREAEKWDKLRELRNKRGNVSLYCDWILANDTAEFTEESLLMLGNTPFRRTQFRGNGMPTLRKRIGKWSYSRQRKLIALKRAELGMPTLFDDEYNTSRKCHICGSMLTTRKWDNGYSWILCHSCGAKIDADFNAAYNISYKVNPIAVWVYNSGIERYNALRCRDDRLKVQMNMGETYASA

SEQ ID NO: 872 - protein, 441 aa, synthetic construct
  REGION 1..441: note = Synthetic
IMQYTKTAIVPIHYETTKKKLSYLDNLTARLTYCVRLWSEIIEKHNINNRKELQNLAFQHRLQKKTILSSAFVQQCGNKALWMWKQYRTTYKKWEWKVKKSKEGTKYHEKLLKREPSIPFSNSKSLLHKVPVRFDYRTGKIDKAGLEMSEWVINISILKKYEKITIFLNASEYHNELLEEGEIRDFEIMKRDNKYYVHITCQFEVKDTKPKSITTIDLGINRSVVAVQFSHSKEPKSIIIEDKEKQDKLQFYNDLVGELRREEKWDKLKVIRNKRRHISEYYDWITAKKVAEFTNETIVVIGKLTHIRERQYKGNENKEHRKRMHKWAYERISGCIQQKVNEKGIEFNRMFESWTSKKCSNCGSYNTTRPVQEAIFCYDCLQGFDADMNACPNMASRYLSKNATDELAITKDDLKIKPSMSLEAPCESWCSSHKKTLEAMT

SEQ ID NO: 873 - protein, 404 aa, synthetic construct
  REGION 1..404: note = Synthetic
MFVLRTLKIPVHYSTTKLKLYKLDRLTRRLSYTVKLWSKLIDDNNIRVRRELQDLRYQHYVQEKTRLSSGFVQQAGNKAFWVWKSYRKKLKQNSFIQKPFSKNKRIAVRIDYRTGSIKKVSLKLASYGVELSTLKKHEKLFLLLNPSEYHLKKLSEGKIQDFEIIKKKGKYFVYVVCGFEVEEQKPEKIRGIDLGINRSITTVLLSKTEKPQINILIDKQKQELLTKYNELIARLQQVKKKKKLKQLSDKRKRIAEYFDRVLAKQLSKLSGENEIVAAGYPYNIRAKNMRGNYNKRLREVVHQWSFSRLLKFITEKYEEKGMRVLLVSEKFTSKKCCFCSSMNTERPTQPELHCKNCNAKIDADVNAAINIALSVRNATDELAATDNDFLYKGLKSETNELIQG

SEQ ID NO: 874 - protein, 465 aa, synthetic construct
  REGION 1..465: note = Synthetic
QKEFSRTIKIPVHYSITKSKLNKLSKITSKLTYAVKLFSDKIKETNKLSRKELSEYEKEIQKTTKLNSAYVQQAKDKAVWMWKSYNKLHKKWEYKLKRAANEKYCSKLLKREPSEPFSKSNNKISARLDYRTISIITNLNLRGKPVKQIKKQTNLTNLWASLSTLKKHNKIMIPLNPAEYHLNKLNQSSKITDAELTRKNNKLYLNITCSYKVYKQEINKIRAIDLGISRSITAVLLEPGKELNKNSFLIIKEGKKKQKIDYYDNLIGKLQDQRNYKLLKRTREKRKNCIENSERKLAKYISSISDNSIVGIGYPKGIKYKNYKGNGNKQQRKRLNKWSYSRLISYTMQKLQENGIEAVKLNESYTSRICSSCRSRNTERPYNNNWSLFHCNDCRITLNSDINASINMAIRTINYYHGSMLDERQVSFNQLASDEHALTADDNLKKGLSAETHKALALDAQGFLA

SEQ ID NO: 875 - protein, 461 aa, synthetic construct
  REGION 1..461: note = Synthetic
TTTIQKTVKLPVSPEITKRKLGRIEKLSARLTFAVSLYLNIIVENDITTRKEANRYQRVIAEQTGLSSAFVQCARDRALEMYRGYKKLHEKWKKKVKKLEKSLERARASKNKNRVKKLEKKLKRLIDREPSPPSVNKKPPIFFDRRIGEIVFSTCKKFKVWAKISTLRKYETIYIPLITYPYADDHLKWKIKGFRLLYNYRLKRWEVHVTVEREIEVHAKGYAGIDLGMKRLAYIKQVNKEGENRVLSFPKEDHRHFFRRVHELNNRIAKLQRKGKIKALKKLKNKRRNVALDFRRKLAKDVASNISNTVVFIGYPRNIREEHYKGNGNKLSRKRLNRWAFKEFGDILILKLRENENHAIFVGETYSTRTCSICGSRNTVVEDRNFYCKNCGVKFDRDENGATNILLIGMKKTGLDEVMLRAGAVVTRPLSVDDGSEELPEHTTSLQGVSSPVVGEGCSPF

SEQ ID NO: 876 - protein, 446 aa, synthetic construct
  REGION 1..446: note = Synthetic
KQTLQKTIKIPVSDAITNEKLSKLNRLTARLTYGVQLFLDRIVANDVTTVKEAEKFRKEVEAITGLPSAFAQACRDKALWMYKSYKKQHKEWEKKVSKLERAIERCKDKHKRRKLERKLYRLRKKEPSLPTVSRKIPVMFDYRIGSIEFSYSAKEFRLWMRISTLEKGKRIVIPLHSYSYAEKHLKSWSIKSFQIVWKSRLKRYEVHVVVEKEVIIRPKKVVGIDLGLKRLVTAYEQGEDSRAILVEKSEYKEFFIRMRELNNRIAKLQSLGKIRALKKLRRKRRNIAADFRRKLAVEMAKQFNDAIVFIGLPKDVRTDKHYKGSGNKRLRKRVNHWAFREFAVTLQVELMENNNLAYIVNEHGSTRRCSVCGSKKVQVDDREFLCLNCGHKDDRDVNAAKNILKFGLERLAKVSLKGTGAAVSQLELPMMRLMPLKVETPSVRAE

SEQ ID NO: 877 - protein, 609 aa, synthetic construct
  REGION 1..609: note = Synthetic
AQSTVISVKVPIRWEAMTEDQRTRLSRITSRDTRVVRAFLGVIALHENDLIVGKTKKRIDGTKLEKLTLTAERYTDPAKLRLTVPHDMKKRFRNISFNELQECRQVATAMWNSYLALEGKKPLSARYYRERKIPRYVFSRRFKIVYSPEKEIHHWLEVVDSLDSWRKDGPFHDRLAVPLSPSSYHLNRLREGEVTSFRFLKDSKHKWWAIFSVRTDTPVVDTKGKPPAVMGIDLGINRAVCSVVLTQGKVRHVRYFTNPEKSRRISRYDEMVDALQRERNTRLNDGVPADGVTRRLCDLSERRKHISVDYDRVMVKQLAVHIIELSQRYNLYVAIGDLRYIRDSAGRSSGRGKSFRTKVGRWSFARVTGLLRHALAQSGWPVEGRDNRLVMVREQWTSKTCHRCGNIGIRPKQSLFVCPTCGYRSNADMNGAVNIARRLIRLIPSLRDEKNGLGRWLLPRERAGLSPKAWRSRRSKGRSGRPLRTSDSRGSNVVECDDQMTLESFASTADPTMVRTAETPPAATAARKASDGRGTTAQRTEAQSGPLGPDKARDERAGVYPVLGGDTNHEKGETRELKASRGVHSPLSNCPDRSVHAAEHNGGNSMSDI

SEQ ID NO: 878 - protein, 584 aa, synthetic construct
  REGION 1..584: note = Synthetic
SNGSIISVKVPIRWDAMTEKQKIRLSRITGRDTRVIKAYLGVIERHEPDLLTGKRKNRIHAGKLDEYTLTATRGNASRVSVPHGFKARFPNLSVNEFQECRDTAIAMWKSYLERGGARPLHSKKYTTRKIPRFAFKQRFKFLYTPHQTIKHWLALRDSLDSALKGKRVHDKILIPLSVSSYHLNKMREGDLKTVRIFKDGSRKWWTIFTVTLNTDSIETNGKPPAVLSIDLGIKKAACSVLLTQKGYKQVRYWLQKDKLPQMQRYDQMIASLQRKKEDHIAQGKDPSGVTKGLRVLRSRRSNLSKEYDKKLVKDITKHIFELIQHFNLYVSIGQLRGIRNIARRGNYKGRAYRGMIHRWSFARVREMLSHKLAALGFDVKKFLAVPEHWTSIKCHKCGKKGIRPKQNLFICSCGYRANADLNGAINIGRRLIMLIPHLRDENTGLGMWLLPREKTTPKARKSSGSKRKSSLPQKPLASFEGESVADCIDQTTLVLSESGEDPAMVNTVEDPSATVKNSNHSTQMQWKEAKHQQRSNTPMMLDKAHITVSNSGLTQAGDSSREKGGTQKFLCVSSVTNRRIRSYL

SEQ ID NO: 879 - protein, 592 aa, synthetic construct
  REGION 1..592: note = Synthetic
MTKRQRTRLERITARDTRVIKAYLGVIEHHKKALVVGGKYKNIDFRLLDRLTLTALRARDPSKRRLSVPHDFKARFHYISVNELQECRDVAIGMWNSYLRRGGSRPLKSTSGKLKKIPRNIFPNLFKLVHTPDLKIKYWLEIRDSLDSKRIGRTIHAKLTFPLKISPYHTNQIDRGEVKSCRIVKDGSRKWWVVFAVKVKSKSFLVPAKKPLAVMGVDLGISRAACAVVITQNGVHHTRYFHQEGKEKSLAKSERRIASLQREMRTRQNMSVPCDKVTKKLRDMNHKRTAVREEWDRVLVREIIDYALELSAKYDLYVAVGNPKGIRNIATRAYSRGRKYRGMIHSWAFARIISKIEHAFSQIGWTTGRFTSRFLAVYEGRTSITCSKCGHRGVRPKQSLFICHTCGCRVNADKNGAINIARRFIRLNPKLRIGHSGLGRWLFPKWKKPSSKAARRGKHASKRKSRLSQRSPASPEGESAVVRFVQQDLLSFGDEAGLSDEDPTVGNAAEMPSVMESLDSPRSGGFHVSKQRKEVTFRERNQVPMTSDKARANLEYSDTTEVSDDSHGSDGTQELQDECELYSPSSERNHTP

SEQ ID NO: 880 - protein, 559 aa, synthetic construct
  REGION 1..559: note = Synthetic
SKGVTISVKVPINWESMAERTRQRLRQTVGRDTRVIRAFLGIIEQNENKLLTGRQKNKIHDGNLDKLTITAIKVKPGYSQRLSVPHDFKVRFPRISQNEMSECRQTAVSLYESYLKLRTKKGWNASRPTSINGTRRIPRWVFSQRFKLIEKKTSVSCWWLDIRDALDSAPKSKFIHDRLSIPLKISPFHLNQIRRGEVKAVQIFTDRSRKWWVTIAVRISIDESPEDSHPVAILGIDLGIEKAACSTLLTPEKTRETHYFVQREKVKVIKKYDRLVADIQREMNTQRNNGLSSDRVAEKLRQMRSKRENVTREYDRVLVRHLLDYISELSKKYTLYVAIGRLKNIRMRAKRGNYHGRRFRGMIHSWAFARITESLKHGLAQQGWKVDGKDPRFRAVPEAWTSIMCWKCGNKGTRPQQNYFHCPSCGYSINADQNGSINIAARLLTLTKSLHSVRGLGLWTRAVVRGTTNQRARLKARKKKPSSKGKSLLSKKESSSGSGESAAVHFVQSDLVSFSDGTGESDNDPAVASTVETLSVTGSDVPAVQQEKEARTSGGIPSR

SEQ ID NO: 881 - protein, 481 aa, synthetic construct
  REGION 1..481: note = Synthetic
NQLITSVKIGIDNEKLSKSTRQRLRQIMGRDTRIIKKYLHIIECHKYDLVSKIELKRTKKSKKGSNVNNEKKFRFTIDKGKLDLLTATTEHRPIVPHDFKAYFPRISLNEMKECRDTACGIYLGHLESKSKQENSGKPNINKPLPRSIGYRRFKLNIDSYIVSLMDSMDSNLGINSNNHKKIRHQYLDLPLKISSYHRTQLQKGDIKSLRIKRVKQKYLAIFSIKQTRFSGEHLANKKNLPIAVLGIDLGIKQDVAISVLTKYGIVQQQFITSNLIRNTKKSLTKLERRYSNIKNSIAKDKSNSNNDVDGKLKLIRDIGNKRSRLKFEINHQLTAELIYFIKYVAVYFDLYIGLGKLKGIRKSAIKGKATKNHRKRIHRWAYSQFTDLLEYKLHKIRPIIRFAKVSEAYTSQTCWKCAQRGNRPKQDYFVCRNSSCGWRGHADFNGATNIAKRAASYFDLTPNLKPFFMTNGESGLSPVST

SEQ ID NO: 882 - protein, 780 aa, synthetic construct
  REGION 1..780: note = Synthetic
NKISTSVIVSIDTSKLSHQNKQRLRQILGRDSRIISRYIGVIEDNRKELVEYKEKKNGKISIKIDKGKLDQLTCTTSDRKIVVHDLKIQFPRISLNELKECRDTAVGMYLSYLELEAKGNASIPTAKSSFPRSIGYRRFKLRYHKRTLTIMDSMDTNPSMINNGKKKIQHDKLTFNLDLKKYDICKIMEGSLQAVRIIRSRRNYYAIFAIRHEVKQLTSKYPKKSNKELAIAGIDLGINRDAVISIITAHGVSQHKFIKLERIENTKQSILKLDKRIAEIQHKVAKRSTDKEQTDGLYSLLRELRSERSELKYEISHQLSAEINKYLLSLTDQYDLWIGIGKLKGIRASIPTAKSSFPRSIGYRRFKLRYHKRTLTIMDSMDTNPSMINNGKKKIQHDKLTFNLDLKKYDICKIMEGSLQAVRIIRSRRNYYAIFAIRHEVKQLTSKYPKKSNKELAIAGIDLGINRDAVISIITAHGVSQHKFIKLERIENTKQSILKLDKRIAEIQHKVAKRSTDKEQTDGLYSLLRELRSERSELKYEISHQLSAEINKYLLSLTDQYDLWIGIGKLKGIRRGQRRGNGNKRHRKRMHRWAYGQLTWMLEYKLSKSGYKRRFLTIPEGWTSIKCWKCNTKGKRPKQEYFKCKNRTCKWMGNADFNGATNIAKRAAKYFKLTTHLKSSLFEVSELGSAEPKTMKVFNKNNTRGSSNLSNNLSGRNAVNSDQAMVKNHGNPSLLISFFKASSEGEDDRNTDLILSNKNKSRTLLASQEVVVTPDSVCGT

SEQ ID NO: 883 - protein, 707 aa, synthetic construct
  REGION 1..707: note = Synthetic
GVITSVTVPINYSILGKYELRRLTQIVKRDTHVINKYLGIIQFNQKYLLEFKKGQYSGKLDELTLSTHYGRKPQYDLKSKFPRISHNELLECRDGALGLFKSYIELSKDEGNVNTGFPRINNLTGRQINSRRWKLDVTNCTIRIIDSMDSNPKMIKDGKNKTYHDWINIPIKLSSYHLEQMNLGKLRTIQIVASINQNRENQFSIKFSILHDVNQLPRNTKGDVKSKPVGVIGIDLGIKIDITTAMITGKGVIDYKTFKVDEDIKNSIRKTENTLKELQRSSQIRKFDNFVDTYVDRRNKIIQDLSSNSFNLYLNKISLHQMFVINDKLIQIRNAFKYDNLSSFDLKSRAEIIHNNRIPLLAYLESILNAIKSIFDVNYDNMSKDEKSELRKIRKSIYKTKDSLETMKLLLTPQQLYNTDSIFKKLRDMRNKRKKLSIDADRKLVVEFNKYVEEISKDYDIYISIGKLKGIRNRSRRGNGNKYLRRLVNRWTFYRITNMIELKMAKLGLKKRVLVISEAWTSKTCWKCNTRGDRIRQNLFQCTNKKCIWRGNADVNGAINIAKRLIATFKLTSFRNRGVRGLGMYLPVISSKKKKYGKARSVPKNHNGSPNSLLNNKNNGNAGTQSTHSSLNEFFENDQPVVKNHGKTDFVETSKKRSRRTHRSNGTEPNSTEAILAKTKKVKVMATSDIGLQNVKNLYLKKKINNG

SEQ ID NO: 884 - protein, 547 aa, synthetic construct
  REGION 1..547: note = Synthetic
FAIQVPIKWDKMSRSQQLRYRRMQKRDSNITKKYLGIIKKEHDNLVTLSNRNKYQIDAGLLDRLTLTTKSRRKVMYDLKSKYPRISTDELQECRESAISTYKSYLELSKIQNSKLSIDKPRKEQGSLSRTILYNGGARGRFSINNAVLSVRDSMDTNWSIVNGVKKKLKHSKLKIPLKLSKYHVEQISKGNIASLRLSKKLSERDEMHYANFSINSQIESQEVKGKPKAVMGIDLGIKKTAFTVVMTDTGIQHRKTWHSDNKFKELSRLEDQIASLQREYYHRLNNSIDRGNISKKLTELRNSRKIISLEYDRILIKELVEHIQSISQTFNLQIGIGKLKGIRKNGRKGNGKGKKFRKKLNSWAFFRFTKLLEHKLSEIGLKNKLFAIDEYWTSIFCYKCNNKGKRPTQSFFKCLNTQCGVRNNADFNGAMNIAKRTVKYRKLAPKSTWSKVGLGRFLRPYQEKGTKTTPKAHSRMRRRSPNTVKKNLAISVPVSVVTSHHKSSNDINFDIIDDIENDLAMVKKYEKAILVKPASLNTPSGRKRPSL

SEQ ID NO: 885 - protein, 479 aa, synthetic construct
  REGION 1..479: note = Synthetic
VKIKNEVLTTRKKEKLRRITGRDTRIIEKYVRIIHHNRRKICRRTKKGKGEIRVHKGKLDELTLTTSRLKKVEERRESVPHDFKKMFTYCSHDEFQECRDIAVQLYEQGYRPEATRPPIKRARRQLINKKRFILVHLPKEKNNILTRWWVGIRDSLDTWRKGTRYHQRLWLPLEMSTFHQKELKKGQIKSLELRYKRSTREWWVYFQLKVLPPSSFYPPEEESSSSLPPAVLGIDLGINIPAAGVLLTPKKKLTIKEIKFWHTKQWNRINHRYKLKLSRLQRKGALNDQSGKKHQIYRFLGLLRRRYRNVKRSYIHQFVSDIVQTIESYAQVYDLFVVVGYPKNVRKGKEKGKGKSTRYFRRKLHQWNYALVLGLLRRALILRGFAPHRIITLDERGTSSHCSCCGKEVSRPVRGLVHCSSCNYTFHSDLTGARNIAHKFLSHLFRPLATTITDYSTGQKFSLTHYTVCQGLSHWLQSQ

SEQ ID NO: 886 - protein, 476 aa, synthetic construct
  REGION 1..476: note = Synthetic
NSVRTTVRTRIKTEVLTARKQRKLEQITGRDTRTIHKYLKVIYHNEEQVVSSRSGTKTVSKSKLDHLTLTTSKHTQHSLRTEVRHDLKHQFSRSSHNELQECRDNAVAIYHSQQALTSSPTKSLFQKKIPRTQSANRNRFLLTCSPTNSIARWWVGIRDSLDTVKNNTTRHQKLWLPLACSPYHENKLQQGKVQALEVLYNPKKKEWWVHLILLHVPPLYTSSRPPAVLGIDLGINKRAVSALLTPKGIINRHEIRFWSDKTRKQLLKETERKITKLQKKLASPSLSSGERRTFLHHLKILRKKKRKEHILTDHTYVNSLVRYILSLGKRYDLFVVVGFPVHIRKSHFRGNHRPYTRKHVHQWNYRRVTELLKFKLSLQGWDEHRVLAISESWTSSTCSRCGSYHTLRPTQPSFICNTCGYQLNADLNGAKNIAKRLIKYVLQPNYTTIKDLVTGKFFPLSCFRVFPVLSQWLPTK

SEQ ID NO: 887 - protein, 490 aa, synthetic construct
  REGION 1..490: note = Synthetic
SISGYYHVKIRIKTERMTAQECDRLRIITNRDTRIIKDYLRIIYHNEEKILRNDSKVAKTQLDKLTLTTSKKTQHKLRTTVPHDLKKSYPRCSHDEFIECRDKAIWTYESWKAQQKQSKEDLSRPQFKKKTPRIYYKGLEHRGTFRVIPTPDNTLAKLWLDLRDSLDTKRSGRTNHKRLMLPLAYSPYHKKKLILDNVKTLELVYKSKEQQWCAHFTLQYTVPLYQSTQPPAVLGVDLGIKKTAVAVLLTPTGKVIMEELCFIVNKERQAKMWRLEKQIKSIQRELDTRNYNGQPHKQLNVKLYQLRRRLRSVTQQELGYAVNQLVDFILQLKKQYNLFVSVGYPKYIRKSQPRGSGNKSLRRQLHKWCYRLFITKLQHKLTQHGFEPHRVVAVNESWTSQRCSKCNSLNTTRTKQGKFNCHDCNYEINADLNGARNIGKRLIKYALKPEHGYTSIRDTLTNDYHSLKLYKCLQPLSQWLKYSVKNLSSR

SEQ ID NO: 888 - protein, 535 aa, synthetic construct
  REGION 1..535: note = Synthetic
DKSKSTYKTIKFTILTDKKEESILEKMTRKHTYAVRRFLEIIKKEKLTSRIKSNLLKLTLTSRNRPAVSYDLRKETKLSYRFLAQCMSYAIWLYRAYIAKYKKWEQLILKQSQYKIEKLIHEVEVDSTGKLLSIKDDTTEILDNILNDRLIEKILKSRHSFPCESINHKPKKIPVYFDNQILELEKTSDVFKLVLSTLKLRERIILNLKTSPYHFREINGHQVVGGSIYKNLNKRRWEFHACVKINAPKYFGNKKAILGVDLGIVTNATVVVLLEDKPLKQKQIHFLKVPELKQKKFFLMQRKNYLQKKLANAHPIQRKPLIKELKNVYSKITKNTKTLCHKISKIIADIAQDYLTSGYDVHLAIGQLSGIRTRAMKGNYKGGKFRGKVHSLPYYQITENIKYKCRLVGVDDKNISVLSESWTSKTCHKCDSVNTTRLSQASFKCLDCNCEFHADVNGAINIALRYIKKYFIKDLIRIKMIYLFPNKKSEGLSNPSVTLLNPQGTRSSPPCNESTGADFSAHVKVEDARKVQTLK

SEQ ID NO: 889 - protein, 452 aa, synthetic construct
  REGION 1..452: note = Synthetic
HLVWCVKYRYKLLTPEIAQTLKYFFFNKQSAWKIEIISLSIEPDYIHMLFKIASSQIDINKLVKRIKDSNSHFIRRKFSYLQVYPSLWTASYYLGTTGEVSNKTIENYIDSQGLQEEEIVKRTFVYKMLNPNKKKEHQLNTWLRDFKTRPKGLQSGYQGKFPNQICLRNDLIKIEPSKNISCDYWLTLPGGNGWKPISVGLLGRTLPSDAKIKDSKIIKKDNTFWVHLNIEQRRVIKNNIAPSKIRAVDLGISHPITSILLENNYLKDYQFLGKELKCLLYKRQKRASKLQKYVKKLSKKLRRYTLGIKDWTHKYTREIVDKAKKENACLVVGNIHNITRKWDKKERERNSQFRKKAKPIPYGRIMSQLWYKGTLAGVQVIFQNEAYTSTRCSRCGELGCRTNEWFVCKNCGYTNQADVNGAVNIALAYRWGYNDLARLPGSSQETYDFNRR

SEQ ID NO: 890 - protein, 473 aa, synthetic construct
  REGION 1..473: note = Synthetic
HLVFSTKYRYNLLNEKIATILKNYFIKNQEKFQYKIISLAIESDHVHMLFQLESSEVNLNKLIQRIKGGSSFLIRKKFSYLKRYPSLWTESHFCNSVGNVSQETITNYINLQGIQEKEIVSRTFKYKVLTPTKYKDNVLQTYFQECLLNKRDKTSSAIFQDFPRINRKEDEFGLYIRSQSSKIDSNNSKLAKYWIKIPGSRSQNSIWLGLQGRNLPEDCRVKDSTIRFQKGSYYVYLNIEQDRIIKKASARKILAIDLGMNHPITSVMLQDDHMSYHKFYGNELKNQITRRVKYYSQLQHSGIEEPTSKHQNRIDSLVHEYVNDLIQKAKQEGCSIVVGDLHLSKKFTKGNSNQKTRTKGNRIPYYKIQELLYYKAILNNIPIVFVNETYTSQTCSRCGYVDPNNRKGEQFHCCECGYQNQADLNGAINIGRKLVNLLSSSYPTLRESYSEESIFDAFRNDSGFKPTALAVGR

SEQ ID NO: 891 - protein, 261 aa, synthetic construct
  REGION 1..261: note = Synthetic
DFLLCLTLEEPDVAFDPSGSHVCAIDLGTDNFAAIVCDDHSSAIYKGGAVLSKIQWFHKQRAKYVSIITKGHEKKHAVSKRLRDLSFHYANFMKDQCHKISRSIIDFCMEHQCGTLILGVNLLWKQKSNMNKINNQNFVSMPITLLRTMITYKALNAGIRIIEQEESYTSKADLIANDRIPTYGVDDKDASFSGKRIKRGLYCCSNGMILNADCHAAANIMRKAIPDIWKDTRDYTFLSAPDVYGFHKLNPKGIPVKGIAA

SEQ ID NO: 892 - protein, 454 aa, synthetic construct
  REGION 1..454: note = Synthetic
RVTQRIISSDDLLYPYFDDLCRKSKLLYNAALFRVRNIFTGYDKEHRTENEVEVFQEVALLQRSYPNMHVRRVISYTHLEKMMRVTENADFFSGLPRQTAQQMVKQSVTDFKNWLASLREYKKHPEKYLGKPKMPRYKKSDLTTVIITNQDAVLYRDDIGMSLKLPLQKQRLYFSNLSSDPVLKEVKIKPYYGRFLLCLTLEEPDVAFDTSGSHVCAIDLGTDNFAAIVCDDHSSAIYKGGAVLSKIQWFHKQRAKYVSIITKGHEKKHAVSKRLRDLSFHYANFVKDQCHKISRSIIDFCMEHQCGTLILGVNLLWKQRSNMNKINNQNFVSMPITFLRTMITYKALNAGIRIIEQEESYTSKADLIANDRIPTYGVDDKDASFSGKRIKRGLYRCSNGMILNADCHAAANIMRKAIPDIWKDTRDYTFLSAPDVYGFHKLNLKGIPVKGIAA

SEQ ID NO: 893 - protein, 374 aa, synthetic construct
  REGION 1..374: note = Synthetic
MQTAEDTVKEAVKNFRKWLDNLKLYKQDPSLFTGKPRMPKYCRSTHRTFKVTNQDAVLYPKADGGTEGCSLKLPGFKKKERIPLNYIDQGSNLREITFKPYYDKYIMSFVIEDMAAPFYPDMPYMAGLDLGTDNIAAIACTDGTSVVYKGGAVLSENQFFAKQRAQAVSIITRGHEHKHADSAYLEALSREHDCFLKDQMHKISTDIIRYCVDHRVGILVIGVNKLWKQNTNMGKKNNQKFVSIPHYRLRQMIEYKALRAGIDVVEQEESYTSKADVTASDFMPVYGKVKARPVFSGRRIERGMYLCRDGYCINADCNGAANILRKAVPDAWKGFKDFHFLATPASRGFHQLNPAGRNNSHKQHPDWKILSPAV

SEQ ID NO: 894 - protein, 482 aa, synthetic construct
  REGION 1..482: note = Synthetic
AIPMVISKESFGRIFTFAEDNSALAKNLYNAALFRIRQVFTGWNKTKRTDLEQLVFDELKQTEAVYKSFKPRHVLSYAALDKIMRATGNPDFFAGLPMQTAQQVLKDAVHDFKAWLDSLKEYKKNPSNYTGKPKMPGYCKSIRKTFTVTNQDAVIYPVIDKNGCITGNELKLPGFKKKERVPVNYIDHKSNLRMMTFKPYYDKYIMTFVIEDMAPPFYPDMPYMAGLDFGTDNIAAIACTDNSSVIYKGGAVLSSNQFFAKKKAKAVSLITQGHSKMHAESEYLLTLSRKHSCFIKDQMHKISTEIIRYCVKHRIGILVIGVNKLWKQKSSIGRRNNQNFVSVPHFQLRQMIEYKALRAGIDVIEQEESYTSKADITASDYMPVYGKEKCRPVFSGRRIERGLYSCKEGYCINADCNGAANILRKAIPDAWKDTSDFHFLATPESIGFAMLNPADSHKKYKQHNNWIFVSADAAGCSYRPAA

SEQ ID NO: 895 - protein, 303 aa, synthetic construct
  REGION 1..303: note = Synthetic
MPKYKKQDIMILEYTNQDVIIYDNGIKFPKIKTRLVVSNLKPSDSLKQVLVKPFYDGFMVCFVIDVETALSMHSMPNCASIDLGVDNLAALVTNEGHTYLYKGGIIKSINQYYNKQKAHYTSVLQSQTQEEAVSSKQLTTLNRKRYFQLKDYFHKVSKDIINKCVRHHVGTLVIGENKQWKQNVNIGKVNNQTFVSIPFDMLKKQLKYKAEQIGIQVIFQEESYTSKADFLSNDNIPSLGDKKTSFSGKRKGRGLYQSGTGIILNADINGACNILRKYDIHAFDGVSDFQYLQRPIVLSNLYT

SEQ ID NO: 896 - protein, 435 aa, synthetic construct
  REGION 1..435: note = Synthetic
VSRILVSRRKQPQLYTYLAEYSQLAKNLHNAALFRMRQNFTAYGKTDLTDNEAAVMAEIRLLQEHYGSDIRQVLSYVQLERLMRVTENPDFFSGLPMQTAQNILKQTVQDFKSWLSALKAYRKDPGGFTGKPNMPGYRKGDYDTFTVTNQDAVLYAGENGTVLKLPKTNIRIPVSHLSPELKLREIKVRPFYDSFEVLITLETDDIPEVSGQALCAVDLGVNNTAAIVTNTGRSVIYKGGAVKAANQWFNKERARLVSEVTMGGKPYRPTRKLDSLSRRRTLFMRDYMHKISHNIIQFCIENKVGSVIIGENKGWKQNSNIGHRNNQAFVSVPFDMLKNQLIYKAEAAGICVIMQDETYTSQADFLAGDNCSEQTFSGRRIRRGLYRSATGRTVNADLNAAANIMCKAIPEAFDGVTDFSFLQKTKCIRFKDLYH

SEQ ID NO: 897 - protein, 229 aa, synthetic construct
  REGION 1..229: note = Synthetic
PDDAKLVEVKIKPYYGNFMILCTIETESVSVTEDRPFMAGIDFGVDNTAAIVTNEGYALLFQGGALKSANQHFNKERARLISCITVGHKTEENATSKRLRNLSMHRDLFLRDQMHKISSLIVSFCVKHNVGTLVLGVNPLWKQYSSLGDVGNQNFVQIPLAVLKFMITYKVQRSGITVMEQEESYTSKADFLSHDYIPTYGVDDDRADFSGLRVKRAQKRYRNISECRC

SEQ ID NO: 898 - protein, 443 aa, synthetic construct
  REGION 1..443: note = Synthetic
MYCVDRIIVRASDKVYSYLDENASRAKLLYNASLFRVRNHFTAAGKAVLTPNEQDVENEMALLPTKPGRVINAYALQKLMALTHNPDYYSGLPSQTAQHITAQAVTDFRNWLKALKAWRKDPSAFLGKPKMPHYVDADIKDYLFTNQTASVNDGILSFPKTKATLRCRIRDGVLREIKVTPYYGNYMLCVCYEVQDNVSEGRTHSAAIDFGVDNIMAVTSDTGDSVLFKGDAVKSENQWFNKRRAELVGIITKGHPTATCPASKQLEALSMHRSEWLHDTFQKMSSRLIEWCDAHDVGKLVLGSNKGWKQNSSIGRVNNQNFITIPFCTLQWMIRYKAERAGIVIAEQEESYTSQASFIDNDRIPVYGDTVARDMFSGRRIHRGLYKSKDGILINADLNGAANILRKSGADTSCVAISDLQNPLVLRQPDLNTRIPVTGIGAA

SEQ ID NO: 899 - protein, 232 aa, synthetic construct
  REGION 1..232: note = Synthetic
MEVKVKPVSGGYELLLVYQVKAASVQSGKHAAAVDFGVDNTMAVVSDTGKSILFKGRFIKSVNQYFMKKKAERISLMSKGKETTERVWSKYLDRLSAYRTSYIRDCFHKMSRKLLVWCQRNDIGCLVLGSNAFWKQNSCIGTVNNQNFVSIPFEMLKSMIELKACEYGVTVVRNEESYTSKASFLDSDDIPVYAEGDGTKHHFSGKRIQRGLYRTSDGTVLNADINGAANIF

SEQ ID NO: 900 - protein, 467 aa, synthetic construct
  REGION 1..467: note = Synthetic
TVRTLLKESENKELYQYAYAGMELSRRLYNAALFRLRQNFTARNKPALTANEEQVMDEIMLTVQATGMKAPKALISYLFLEKLMRATGNPDFFSGLPMQTAQEVLKQAVRSFKGWFSALRSYKKDPTAFTGRPKMPKYMKQDSLNTIVFTNQDCVLYTDNGRSRLKFPKTGASVFGVTHPEGGRLMEVRLKPFHGRILLLCTFEAADPEVRSPGPYACGLDFGVTNTAALVSNNGLAVLYKGGLIKAANQWYNKRSAELKSIMMKGKDPSNASRYVKTAKLDALSLKRANILQDAMHKISSDIVKTCCKNGIGTIVMGINHGWKQNINIGHANNQKFVQIPLFMLQSMITYKAERASIRILRQEESYTSKADLLAMDPIPAHGTTQEVSFSGRRISRGIYRSEAGTVINADLNGAGNILRKAIPTAFGRNADFSFLQNVQVHDVLPHTKRKARQPRHRRDREVLAAA

SEQ ID NO: 901 - protein, 453 aa, synthetic construct
  REGION 1..453: note = Synthetic
VTRTIVKRNEYPEYCSYFSALGVSVTNLYNAGLFRVRQNFTIRGKEHPSDLELQVQEEIKLTVVQKHTKTPKSCLSYTFLEKLMRVTNNPDFFSGIPMQLAQNVVKHACQDFKNWLASVKEYKKAPDKFLGAPQMPHYKKKGSVSGLHFTNQDCVIRDNNGKSYLKFPHFHGDYLPIGYVSGSLKEVRVRPYYSDFLVICVYETESTEPLPENGNVCGIDFGISNIVALVSNTQKCMRYKGGALKAQNQWYNKQRSYYQSIAMQGHEAKEAKQPGVLNTRHMEQLNRKRNQFFHDALHKIASDVVKFCLENDIRAIVLGKNKNWKQNCNLGHHNNQIFVQMPIATLSYCIKYKAEENGLFVMEQEESYTPKASLVDGDKIPVVGDQEKPSFSGKRVSGRLYCTKEQMLINADLNGAGNILRKAYPTAFEGITDYHFLNKMIVKKCNTMYSRNG

SEQ ID NO: 902 - protein, 460 aa, synthetic construct
  REGION 1..460: note = Synthetic
IMRYCVSQTTVSENRKSELTAYFDKLSFLSERLYNAALFRLRQQFTMKGKSSLSANEREVHDEIEKTISVYGCGRPGRVLSYTFLEKLMRATGNPDFFSGLPMQSAQQTLKLACRAMKGWLEALRSYRADPSQFTGKPGMPGYRKNGHMLIMFTNQDCVIRDGMLKLPLTKERIRVHIPDGARLREVQCRPYYGNYRVICIFQAASEVVQSTGDRTAAIDFGVSNIASIVVNDENISPITYKGGALKSANRWYNMQRARYVSKIRKSHCPATGQADTAMLRRLGRYRSDFLSDQMHKISSDIVRHLIIAGVSTLVLGRNKGQKQNSAMGKKNNQSFVSLPLWTLQIQIRYKAENAGMVVMDQEESYTSKASFIDRDEIPVYGKERTVPSFSGMRKGRGLYVASDGSVLNADVNAAANILRKAFPEAVSHIRDHGFLQKIRVVRFYDLNQKRNPVKRIAAA

SEQ ID NO: 903 - protein, 455 aa, synthetic construct
  REGION 1..455: note = Synthetic
YSVSQYVISDDQKDLFSWCDIMCRKAKLLSNAATFRLRQHYTSYGKEDADLQPQQLEVEEEIRRTIASTGMTAPGRQIGYAFLEKLMRVNRNPDFFGGLPMQAAQQVLKMRTGDFASWIAACRAYKKDPSLFTGKPKMPHYIKGDLATVCFTNQDCRLNYKDGAPYLKLPMTDAIVLLGRVPSQGRMKEVKVVPFYEKFRIIVTFEELANRALPQGTHAGAVDLGVDNIAAFVSNDGSPSILYKGGYLKSRNQWYNKQIGSYRSTLMAGHDPKTHRCPTTKMMQSLGRKRTLQVRDELHKISSDIIRQCRIRHIRYLVIGRNKLWKQKTDMSKQSNQNFVQIPLYSLIRMIRYKAERAGIVVIEQEESYTSKASFLDQDDIPVYGKNDSNVSFSGERIKRGLYRSKNGTVINADLNGAANILRKAMPFAFAGITDFSFLQNIRVMNFKNFHDCMA

SEQ ID NO: 904 - protein, 453 aa, synthetic construct
  REGION 1..453: note = Synthetic
QMAYAVRKTYISKARHPEMYGYLDSYSRKSKLLQNAALFRLRNWFTAHGKQSLTVNELSVVGEIDAAVSAGMGRPKAVLSYFALDRVMRVNHNPDFFAGLPMQSAQECLKQKCREFRSWLNALKEYKADPSKLPGRPKMPGYIKSDTAIVRFTNQDCVLYGDTMKFPHTKETISFGRLPEGCILKEVQSVPCHGQYLLIAVLETPDTDAVSDMPYKAAIDFGVDNFASIAPDTDIPCLICKGGAMKAENQWFNKRMAELKAVLMKGHDPWAYHPASTKQMEALSLKREQFFHDYFHKLSKYIVRWCLENRIGTLVYGHTKLWKQKTSIGKQNTQNFVQLPFMAFVSMLRYQCGREGIRLLEQEESYTSKASAVDGDLIPVYGQEHEKPYHFSGTRVKHGLYRTGDGRTVNADLNGAANILRKAFPDAYECTDVYAILRNIQTIRFGTLYKVSG

SEQ ID NO: 905 - protein, 463 aa, synthetic construct
  REGION 1..463: note = Synthetic
TIRYVVKESHPLHAYFGELAHLTNNLHNATLFRIRQVLSAVGKDTPTPNEQEVLNEIKAALPVMNETRAKANAKRRASGKPESAPFEMPAFGTSFLSYPFLDALLKATKNVDYYAPLPRQTAQLVVKEARGDVKNYFAALRAYKMKPGAFLGQPKIPHYRKSGGMRDIPFTNQDCTLRNGVLKFPGTKDVLNLGRSIPEQVKVKQVEVKPYYGAFQVCVTYDDIKTKIVIPDTAPKRVIAIDFGVDNIAAIANNIGECGLLFKGGIIKSANQWFNKRRAQIVSGITSGRPTDFCPSSKSLDRLSMWRDGVLSTELHTCAKKIVKQCVEWNIDTIVMGVNSGWKQKSNIGRKNNQSFIGIPHYKLQQYITYMAEWEGILVIEQEESYTSKASFLDMDFIPVYGQPEATEAKFSGYRKRRGLYKSLNHTRFVNADLNGAGNILRKAFPDAIDCTQDRFLREIIVM

SEQ ID NO: 906 - protein, 332 aa, synthetic construct
  REGION 1..332: note = Synthetic
SSRNGSTVCLGYPIPNARLKQACITPNNGRYKLSFQFEVDADIPEIPEDIRPERICAIDFGVDNLMSVTNNCGLPSLIYKGGVAKSVNQKYNKTIAALVSEQTLRTGEKFVPDAAYHAATNRRNDQISDFMRKCAKHFVAWCIENRIDTVVMGINKYWKQEAGLGKRNNQNFVQLPFDRLRNIIRYLCVWEGIFCLDQEESYTSKASFPDRDFIPVYGNEKGKPSFSGQRRPVHYKGMYKKDGFRGLYTTKSGDIINSDLNGSANILRKAFPNAFTEKPAPDFNSVVIIRHPDEEKVKNNRKKQTAVQKQDSHAKIKRQRKKDAKRKKHPAA

SEQ ID NO: 907 - protein, 503 aa, synthetic construct
  REGION 1..503: note = Synthetic
TITVCITQNHPLFNYAETVTRLANHLSNAIRFRQRQVLTAVSKPATNWSANEQEVMKEILDTISQMKRPVPVPTKENHFLGYSFLDSVMKYTKNPDYYAKGLPRQTAQYVLKQAVRDMKTFYASCHAYAKDPSAFTGKPKLPGYKKKGGHTTATVSNQDCIIKLRNGKWYAEFPFIKEMPVCIGFPIPDARLKQACIIPENGRYRLTFQFEVEKDLPEHSKESHRICAIDFGVDNLMAVTNNCGIASLLYKGGPAKASNQWYNKTIAKLVSEQTLQTGKKFIPDETYYAITNRRNDQVSDYLHKCAKHFVTWCVENRIDTVVMGVNKYWKQNSGIGHQNNQEFVQLPITKLREIIQYLCEWNGIRCIEQEESYTSKASFPDHDPIPVYRKEDSTKYTFSGKRKPTHYAGMYKKDGFRGLYKPPNGTIINSDLNGSANILRKAYPQAFDGESLPCFENVFIILHPDYENQKKNRQKQLQAKNSFSKSKEKRQRRKKCAFRQTVA

SEQ ID NO: 908 - protein, 400 aa, synthetic construct
  REGION 1..400: note = Synthetic
RRTYKVQIGRGHGLYPWCETITSLANNLYNACRFRQRQLITAARKTDRELTDNEKGVIAEFLSVLNCNGRSGLPACPRYETFDTVMKLTKNPDYYAKGLPRQSAQQVLKRSCADVDNFFAAVKAWKDRGCPEGERPKFPGYKRKGGHGAVAITNQDCTLKEGRDGNLIAGLPFAKSMPLKIGFPLGRLKQAEVCPDNGVYVIAFSFELDLEVPVPVHPASWIAAIDFGVDNLMAVTNNCGLPCLLYKGGIVKSTNQGYNKRLAQIMQEEMKKPGCPKNKEGKPWFVPTEESMGMTLRRNNIVHDFMHKAAKHLVLWCVENRIDTIVGVNAGFKQEVNIGHINNQNFVQIPFAYLRSCIKYLCEEQGILYVKREEDLEYDQMSLVEYIDPFTGEPVRKNKK

SEQ ID NO: 909 - protein, 466 aa, synthetic construct
  REGION 1..466: note = Synthetic
SMNINVKNGPIFDWCDELAHKANNLYNAALFRERQVMTSRKKTDAQLTDNEKEVLREIEVMNERLLSRNKKPRKISRTGYLSYEFLDDLMKLNENPDYICDTLPAHVAQHVLKHAAGDIRSFFGAMKQYKQDPSLFTGKPELPHYKHKQGICSFDISNQECVIRQNGKGHYVAKLPKTKCIVSLGKQVPGILKEVHVAPINGQYQISFVFDDGEELPAHITEQPERIASVDFGISNFMAVTNNCGLGCLLYKGGVIKSANHRYNQKIAAIMSRQTKGGTEKFKPTEEYYAVTQRRNNVIKDYMLQTGKHFITWCVENRIDTIVLGDNQFWKQNIRMGVVNNQNFVQIPFDQMKKILTYQAERRGIRLIRQEESYTSKANFLGQDDIPVYGGNDEDVRFTGTRIHRGLYKTNAGTLLNADINGSANILRKCISDAFRSHELAYNQITVVRHPMYEAVKENRNRQISK

SEQ ID NO: 910 - protein, 459 aa, synthetic construct
  REGION 1..459: note = Synthetic
TLRVEIKDTHPLYTYCSDVCHATNNLYNAVLFRMRQTMTGLQKLECLPQSITLNEQEVLNELKDFTNCNPSYRMPTAKKWFLPYGMLNRLLYDNKNVDYFAQHLPRHTAQQTIKQAVQDMKGYCKSCKAYAKNKQAFTGAPRLPGYKKPGGMCTASLSNQECVVKKQDDICFVKLPRTKEVCQITTPVGRLKFVTIKPYFNVFYISFVFEIPNAFEPIERDDYNERIIFDKPERCIAIDFGVDDLAAISNNFGHKGLLIKGGVVKSKNQWFNKLNAQMQSAKDQGVLLDLYRKNWVNRNNFMRDVMHKYADYIIKYALDHHVDTIILGSTKGWKQSSKMDKKNNQSFVGVPFDLLKKFIAYRAVQHGINILYQEESFTSQASFKYKDDIPVYGELSEEEYDALKFSGRRIKRGLYRNQDGSIINADLNAAANIGRKALPDLFAQVNFERPDILTNIFNM

SEQ ID NO: 911 - protein, 460 aa, synthetic construct
  REGION 1..460: note = Synthetic
RTVTVAVAHKDPLYPVLDKMSLRANNLYNASLFRLRQIMTALRKEPDQLTDNEVEVQQEVEKLLLFKPELRRPTKENPSVGYPFLYHLLYINDNPDYLCKELPKQTGQQIIKNAVRDMKGFHRAKADYWKHPDKYFSEPKLPKYRKSGGRCTYYFTNQQVWFDEDGKIHFPGTKLTGKKLKNVGTDWELKQVNVVPDHGVITLHFIFDDHEQVKETKEPCRIVSIDLGVTNFAAMTNNVGNPAILFKGGWLKHINWQYNRKMANEKSRQTKGSKKPKFKSNVKTDRWGEKRDRRLNDYMHKTAKIIVNYCLKNDIDTIVIGSNQNWKQKTDMGRKNNREFVSIPHDRLKWILKYLCEWNGLNYVEQEESYTSQASYPDLDEIPVYREESNAEYTFSGKRNARGTSRLYRCGNGKILNADLNGSANIGRKAFPELYRCDVKKTLEKIRVYRTVNELNAAGK

SEQ ID NO: 912 - protein, 271 aa, synthetic construct
  REGION 1..271: note = Synthetic
KLPHVKERIPCRRMEEGRLKEAKIVPYHDVFLIMLTYETKSVKACRQPKQVASIDLGVNNLAAIANNIGKRSLLFSGRVLKSIKEEESRTLSRLASRQTIGTEIKLKSSKRAKAIYRKNGLRTTDFLHKTANAIIQWYVENDIDTLVVGCNKEWKQNAELGSKNNRIFCRIPFYALRQKLKYRCEREGIRYIETEEAYTSKASFYDEDGFHADGLSGTRTTRGNYRRANGEILNADLNAAANIGRKVFPELFKTDKVDLRHIKRIVHPELA

SEQ ID NO: 913 - protein, 483 aa, synthetic construct
  REGION 1..483: note = Synthetic
KRSRPIWAASLLSNFQQRQVITDVEKDPAALTDNERGVLDEIARALPVMNAAGKQPTEAGDRYKMPAQGKSFLSYPFLEALLRASNNPDFLCGKLPRQAAQAVLKDCVQEMKSYYAAKREYKRDPGKFRGEPKFPGYNKPSGCCTTTLTNQDCILYDAGRGVHELKLPLTRERLSLGKAPIQGRLKQVKVIPTHGIFVISLTTEVKGELPEPAEVPQRIIGTDLGVNNFSAITNNLGKPCLLFKGGVAKSANQWYNKQMAALVSEQTSRTGAKFVPTPEARMLELRRDNYLSDYMNKVAKLVIRWCVENQVDTIVVGVNKDWKQGSHMGSQNNQSFVSLPFAKFRWQLQYRVERLGIRHIKHEESYTSKASFLDGDFIPVHGEAGADQVKFSGRRFKRGLYRSKSGQVLNSDFNGSAHTTRFARVATFCCRPRWQRKGENKQHGEYHFDGHAVLKRPSCGRTNCLPGGHPGHPAWRYGPRQGT

SEQ ID NO: 914 - protein, 484 aa, synthetic construct
  REGION 1..484: note = Synthetic
ATQICVKPGSEFYPYFDTIAALCNNLRNAALYRTRQVLTMVEKPFDKLTANELEVYNEIAYALPAMGDKFKMPVKGKQFLSVDFLEALMRATNNPDFMAKGLPKQTAQQVLKEVAKNMKGFYASVREHKKDPASFTGKVKLPRYGEKGGRHTIVFTNQDCVIYEIKSKPGFHEVKFPEIKKRLYIADMPLRGRLKQITVKPNHGNYIVSLVFDDEKETPVTRPPHRMVGIDLGVDNTAAITNNLGLPCLLFKGGVLKSINQLYNKKMAAIQSEQTKGTDKKFVMTKKTHSLCVWRNNRIEDTINKIGSSIVAWCCDNDVDTIVIGHNTHWKQNANMGKKNNQTFVQLPLYKLILNITYRAERCGIRVINREESYTSKASFLDNDAIPTYGKNDEEYKFSGKRIKRGLYKAADGTVINADLNGSANILRKEFPDAFASHQPDFGNVIVIRHPDLENAKNNHKKQLAEPKTISKSKTKRLKAKGKM

SEQ ID NO: 915 - protein, 413 aa, synthetic construct
  REGION 1..413: note = Synthetic
KNFKNLNAHQLQTLIEFSKTNNRFKPIGPKHYFPKYEQIDYMFKVNKNPDYFNNLPMQTNQKIIKKVVESFYGWLELSKKYNIDHSKFKGRPRIPGYVKTDKVSFGITNQDAKVYKVKVDKDNILYELKLPKTKKRLTLLKKNISDSHTFVDDALYQVEVIPFYDVYKINVTFKTKKEPINLDKSHILALDPGINNFLTSSNNVGLEPFIINGKTMKSVNVYANKKIAEIRSILDKQFNRKTSPKVQRLWMKRNNYFRDMGNKIAYFIMDYCIKNNIGTVVIGKNSNWKNESNIGKISNQKFCFIPHSTIFQKIKEKCESVGITYIEREESYTSKASFLDKDNIPIYEEGSFTKYNFSGKRVERGLYKTKKGILINADVNGASNILRKEFKDAFKDIKYFSYLYKTVRRITIT

SEQ ID NO: 916 - protein, 446 aa, synthetic construct
  REGION 1..446: note = Synthetic
DDVYQTTGIVLKSDSELALYCKEMCSAAKLFKNTVIFRCRQLLSANYKNYSDLQVHEQEVLNEFKLTEERFKPIGSKYYLPGYLHFDYLFKVTENPDYYNKLPMQSNQQIIKGVLADFKGYFKAVKSYKKNPKAFTGKPKLPTYCKADKISFDITNQDCVVKTGKDGISYLKLPKTKLTVNLGKLVINKLKEVTIKPFYNTYKICIISEEPDIEPVELDYENYLSVDLGIDNFITSSNNCGLTPFIVKGNIIKSYNQWFNKKVSYLQSLLPYGQHSSHQIQQLWKKRYHKIADFYNKTAHYVIKYCMDHEIGNLVIGKNTYWKQNINLGKQNNQNFCYISHASFIKKVCEMASKFGIRVILNEESYTSKASFLDNDKFPVYGEVNHPDFSGRRIHRGLYQSKKGILINADVNGASNILKKAVPTAFDKTLNYTYLYQTVNTIHVNP

SEQ ID NO: 917 - protein, 461 aa, synthetic construct
  REGION 1..461: note = Synthetic
NKMYQAQTIVVNKLKEQKLFHYCEEQCHAAKLLRNATVFRGRQLLFAYNNDYKNLKNHQIEVIDEFNTYTSDKYGKISKDHYLPYSQEFEYLYKQSNNPDYFNPILTAQTRTRVVKQAMEDFSSFFKNAKKYYSDSKNYTGKPNYPKYTKVETITVDYSNQDCTIYEIDGITYLKLPHMQKNKNAKLKPKKCGYINLGKLKIRKLMNLKISPYYDTYKISLVYEIEKFTTSLDNTRILGLDPGLNNFLTSSNNCGLHPFIINGRDMKSYNQHYNEKLAYLRSRLPKKQYTSKQIQRLSKKRDCYFNNKFHKIINYIIQYCIKNNIGTIVIGHNKLQKQKYHKGKIQNQHFCFISHTKFLMMFKLKCTVCNINIIETEESYTSQASFLDMDKIPTYKKGNNKNYQFSGKRTYRGLYKSKDEILINADVNGASNIIKKVFPHAFDKITDFTYLTETVNKITVK

SEQ ID NO: 918 - protein, 444 aa, synthetic construct
  REGION 1..444: note = Synthetic
KAQSIILNRSKHSNLCSIFDEWAKLAKETYNSALFIERQLISSSKKSPSEYTDNELEIRSYVQGKSLSTQKTIGYVKLERLIREHRTELYKSNLPNQSVQHLLKSVVQDLKSYFHAIKDYKNNPAKYTGKSKLTKYCKNDKKSFVITNQDCVIYTRDNGTQYMKFPYITKKFGIFLELPYLPEELSSNTKKLKEVHVTPYYDTYKLEIVYEASESKKTSSNKVAAIDPGLDNLVTLVTSDESLVINGKVVKSKNQWFNKRAAELNSKLDVMYKTSKHADSKQLTSLWKNRANWMNDYMHKVSRFIVDYCVIHDIGTIILGINPMWKQNCNINKVNNQNFVQISHSKLYSLIQYKAQMAGITVITQEESYTSKASYIDNDDIPVFGKENGKPAFSGKRIKRGLYKAADNTLINADVNGAANIGRKALGIRPFQISALQKVTSVTL

SEQ ID NO: 919 - protein, 503 aa, synthetic construct
  REGION 1..503: note = Synthetic
VKTFSTMKIDINAKELTEYFNNTGILVNNLTNVCIYINRQWHFYNQNIYYNDNPEKKQENYKPYNYDKKLIDNLLLYIKEYDAKRFKKHIKNGKSEKDFIKSNFNNKELSYMFLEYYLKNTDNVDYKHKDLGSHTAQQAVKKVAESFKSYYKSFFDYLKNKDKYSGKPELPKYKKKVSFCSFSFTNIECKIKNSKIKFPKTELKLNFNYNTNDLKHIKTTVIKYYDKIQLQLVFEKEFAENKKENLESRHVAGIDLGINNIVTIATNKGKSLLVKDKYLKQLNQFSSKELSDIYSKQTTTGKLEKPKSSKKVKTVFRKRNNRITNFSYILANFIVKYCLDNNIDTLVIGLNRDWKQDSNLSKVNNQSFQQIPFSKIIDKIEYKCKLNNIEVIIREESYTSKSNCLNYDYIPTYKKEDNKEYKFMGKRIKRGLFKTDSNILINADVNGAVNILRKEFKNIKIETDNIKYLTNPEVIKELIKTGKNKKYKNRIGIKKAEKLKKVS

SEQ ID NO: 920 - protein, 471 aa, synthetic construct
  REGION 1..471: note = Synthetic
DVEYTVVKLHVNNNNNLKTYFEKMAFASNNLINVVTYHCRQWFFYTQNLYYIENDIKDVKFYKYDSEKIDDLREHMYIYNQQLLQRNKKPVDFIKYGLDAYFLHYYFKSINQIDYNCKDLSSQTSQQITSKVTQSFKDFKKALFDYIKHREKYKAKPELPRYKKKKSMSGFYFTNQVCTIKNNQINFPKTKLKLPFTYQCKGRYVRTEVIRKYNEFELSIVFEQDPKPALKETDVVAAIDLGVNNLVTITTNKSQSLLVKDKSLKSINQFANKEIARIHSAQTTLKPNSKIVSSKQLMKVYQKRNRRIEHFMYCTASIVLKFCLDNNVSKLVIGKNKDWKQDVKLKKDIKQNFIQIPFNKLIFKIKEKLSCYGIEVLEQEESYTSRASALDFDEIPVYNGKSANVEFSGRRAKRGLYKTKNGILINADLNGSLNIMRKAFPDIEFETTDLRYLQNPRVIKNIMNSQRTAMG

SEQ ID NO: 921 - protein, 588 aa, synthetic construct
  REGION 1..588: note = Synthetic
GLKKKPEERHELESSTIEDVLNVAKKYKKEVVLNEEQRLVSYQFLDFYFKTKKNENYNSSLPKQSAQATIKEAHSKFIEWLKALKDYGKNPSKYTGRPKMPKYKKSGGYSSFQMTNQGVIFRKKKFNYLIKLPKTKETISFNKKLGNERLKTVSVRKEYGMFKITFIFEDLNEAFPSINSNISCGIDLGVDNLAAITTSNGYTLLVKGGFIKSKNQWFNKKIAKNHRGQTIGTTNKATSSKALNRLYKRRQFFIEDALHKVAKKIVLWCVDKNVSTIIIGKNKGWKQEINIGKTNNQNFVQIPHALLINYIKTVASKFGVTVIETDEAYTSKASFLDKDLLPTYNPEGNITYLFSGSRIKRGLYKDSLGRVINADLNGAGNIMRKLISDNEINVNVNNLVSPSILTAKEIYAKCNPVKRIEGAVNRPYRKDDLCCRSLLKNCSFVFSANKETPLYSFAIGGEVHPERLLKYKNRKKFFKNRKSKEISREKIVRSGDCEKILKHYRKATLKKNHKGLPYFEEEIYDEKKCRKYKSICKTSRVLKKTRVITKRRILKSPLLASLNLDPSEENFEKLQGLFSSKDKTEYRY

SEQ ID NO: 922 - protein, 474 aa, synthetic construct
  REGION 1..474: note = Synthetic
LASYFECQTHLAKNLRNSANFILRNLRTGLKKDPVDRTSNENEVIETVRIGIEMANEKLQKDVDRLTKQLQSLPASDPARTKIQKRIENKQKNHPIMPTSDHWMLTYETLDAVMKNTKNPDYYAMPSQANQQVLRKVLKDWKSHFELLASYRQNPGKFKAQPKQPGYIRTPYTTVTFTNQVAKRSDIKGKMHITFPRCLVPLCVGKPEGSYVRTEVKPCYGGYMVYVTFQDAVKTPEAPTNPTRILGLDPGLDNFLTALTNFSATPFIIDGHWLKSINQNFNRRRAALMSELTKGMDSTKSVKNSARLNRISKKRACRIDDFFYKAAHYIVDFCLKNKVEVIVCGHNKDQKQEINLGASNNQHFVSIPYTRFFWILTCVAAKASIPVIETEESYTSKASLIDKDPIPVYKEGDRLEYHFSGKRISRGQYESKEGTILNADVNGAGNIIRKVYPNAFEGVTDFSYTNKTVIREVL

SEQ ID NO: 923 - protein, 475 aa, synthetic construct
  REGION 1..475: note = Synthetic
LASYFECQTHLAKNLRNSANFIIRNLRTGLKKDPVDRTSNENEVIKTVRIGIEMANEKLQKDVDRLTKQLQSLPASDPARTKIQKRIENKQKNHPIMPTSDHWMLTYETLDAVMKNTKNPDYYAMPSQANQQVLRKVLKDWKSHFELLASYRQNPGKFKAQPKQPGYIRTPYTTVTFTNQVAKRSDIKGKMHITFPRCLVPLCVGKPEGSYVRTEVKPCYGGYMVYVTFQDAVKMPEAPTNPTRILGLDPGLDNFLTALTNFSATPFIIDGHWLKSINQNFNRRRAALMSELTKGMDSTKSVKNSARLNRISKKRACRIDDFFYKAAHYIVDFCLKNKVEVIVCGHNKDQKQEINLGANNNQHFVSIPYTRFFWILTCVAAKAGIPVIETEESYTSKASLIDKDPIPVYKEGDRLEYHFSGKRISRGQYESKEGTILNADVNGAGNIIRKVYPNAFDTVSDFSYTNKQLFELPEK

SEQ ID NO: 924 - protein, 556 aa, synthetic construct
  REGION 1..556: note = Synthetic
RVFYAYHINLCGSEQDAKAGILFRVPDSPCKKTAKFSKLILRNLRTGLKKDPVDRTSNENEVLETVRIGIEMANEKLQKDVDRLTKQLQSLPASDPARTKIQKRIENKQKNHPIMPTSDHWMLTYETLDAVMKNTKNPDYYAMPSQANQHVLRKVLKDWKSHFELLASYRQNPGKFKAQPKQPGYIKTPYTTVTFTNQVAKRSDIKGKMHITFPRCLVPLCVGKPEGSYVRTEVKPCYGGYIVYVTFQDAVKMPEAPTNPTRILGLDPGLDNFLTALTNFSATPFIIDGHWLKSINQNFNRRRAALMSELTKGMDSTKSVKNSARLNRISKKRACRIDDFFYKAAHYIVDFCLKNKVEVIVCGHNKDQKQEINLGSGNNQHFVSIPYTRFFWILTCVAAKAGIPVIETEESYTSKASLIDKDPIPVYKEGDRLEYHFSGKRISRGQYESKEGTILNADVNGAGNIICKVYPNAFDGVTDFSYTNKTVIRVTREVLCHAKHKKKHAIPQRKRGMNRWLHHRRQEQKLVYFALFKVSSAKDKTKYIEESKQTAAKKTA

SEQ ID NO: 925 - protein, 533 aa, synthetic construct
  REGION 1..533: note = Synthetic
MRTTTIDIKKRVRNKTAYEHLSGLLRNSKALYNHAQFYIRNTQAGLRKSPENRTANETEVLHDVFTGIQKANITKELNFRKRLKRSSGCHWKMASLFKKSAPLQYPSSDSPYLDYSRLDVVFRENDDPVYYSLPAQANQQVLKKACLAWKSYFKAVGAYHKNPSAFTGFPKRPGYNRDLYATAYLTNQICRYRSINGRGYILLPGTKQFICTGPACSGRYVKTEIRFAHGHFRILVTFEQNAIMPELPKHPSRILGIDTGLDNFMSCTPNTGRHPFIYDGSYLKSMNAYYNKRMARLRSAYTEGTDNPCRTVTKRMMAISDRRESCFRDYFYKLAHHICRICQEDHIGVIVCGHNEKWKQDVDTGKRNNQNFVCIPYSKFFQILRTVAVKYKIHVVETEESYTSKASLIDLDDIPVYQKNDGTVYQFSGCRVKRGLYQTGNTYINADINAAGNIIRKLYPYAFDGFDFHALTATVDRYTAEDILHGLAYTKRSGYAHKRSGCRMDRHNGRAARKKVYLELFRQKKSTQYELSA

SEQ ID NO: 926 - protein, 242 aa, synthetic construct
  REGION 1..242: note = Synthetic
ETIPEAMCDCIVSFENKKMPPVPKNPGRILAVDPGLVNFAACVTNTACRPLLIDGRQLMSANRFFNKEYKRLLGQLPKGQSTSSRIEAMIKKRNNRMWDFFFKAAHVICRYADHEHVELILYGFTNDRSDRNEDILFPIPYGTFFQVLKWVASGYSIAVDLQEESSTSEMDFMAGTDGEETCVMCGKRIFRGLYHSRTGAVINADVNAAANILKKRKPDAFFGVSPDSLLSVSVIHYSDLYH

SEQ ID NO: 927 - protein, 557 aa, synthetic construct
  REGION 1..557: note = Synthetic
DIRYLMERRECVMRTWKINIQPTKDAVLCDYFAENTTAAKCMYNVANFYIRNTMTGIRKSPEERTACETEVLHYVFTGIQKANLHARENYEKKLKKYQDMHTEKGDKLAADLKCKVFPYPTKEKWFLSYGALDAIFKYTDHPTYRRMNSHVNQNAIKKAVKGWKSYFKSIKDYASHPEKYKARPRIPGYKHATKMTAAYTSQTAVFSCQDGHAYLKFVNHKQPVRIGKESLYADMTYAKTEVKPQYGGYTILVTFKEDLVLPEVPKQPKRILGIDVGVSNLAAVANNFGDTPFLIKGGALKSMNQKFNKQRAKLLSAVTKGSDSTHSKKETKQLQALSRKRDAFLRDFFYKTAWYLVRYAKEQRVDVIVIGHNEDQKQNICIGKQNNQNFVSIPFCLFIKILRNTAAKVGIPVADREESYTSKASLLDLDTIPTYRKGNTQAYTFSGKRVHRGLYKTNSGCVINADINGAGNILRKEYPYAFDGQDMSYLYKTTKVVSYTDIYAGAKSVCKEKYNQKSHEPGLGSRVNHRYRQDTRLIYRKLWGRSTFVWTGKKKTA

SEQ ID NO: 928 - protein, 498 aa, synthetic construct
  REGION 1..498: note = Synthetic
TGIRKSPEERTALETEVLHDVFTGIQKANREAEERFLSKLERLVKAGGMKSAVQRSKLIQTVFSYPTKDKWFLNYETLDAIFKETSHPVYRRMNSQVNQNAIRKTVKSWIGYFKSMKEYAACPEKFLGKPKQPGYIRTQQATAWWTKQTARLTFQAGKAYLQFVNLKEMFCIGKESQYRGLKYIKTEIKPFHGQFRILITLNDHVKEPELPENPKRILGIDPGLDNLLTVAGNFGKAPFVIRGGVVKSINQRFNKRRAKLIASLTRGYDSSHSHKDSHALDALSRKREDALRDIFYKCAWYLVRYAKVHKVEVIVIGYNPLQKQEISIGKQNNQSFVSIPFQKLRETIRIIANREGIPVAMQDESYTSKASCLDQDPVPDYKKGEVPPEFSRKRTRRGLYRSANGILINADVNGAANIIRKRYPDVFEGQYMDYLYKTTESVNVQNWYFPYKERRNLRKHVCSKISMVRHGDRSERRAELMKAFGGTRKVWTPVKTAA

SEQ ID NO: 929 - protein, 388 aa, synthetic construct
  REGION 1..388: note = Synthetic
ILCRPCRLQKESVKVQGKTKDAGYLKSAQFTAWYTNQTAQFKIIGSKAYIRFVHCKELFCIGNADLYKDMKYVKTEVKPSHGRYDVLVTFDDKKDDKVEFPAVPDNPKRIIGIDPGVDNFATVVNNFGKEPFLIKGDAIKAKNQWYNKGRAIATSKLTKGSDSTHSVKNSNYLDTLDRKREDFMRDFFYKAAWHICRFAMDNEADVIVFANNKEQKQEINIGKANNQNFVSIAFCSFESILVHTAAKCDIPVVVREESYTSKASVLDGDPIPTYKQGDSQKYTFSGERINRGLYRSADGTLINADVNGGANIIRKEYPDAFKGQNLDYLWKTTKVVKYTDLYKGAKSTCKEKYNNKQHRTSPNSKIRHFYRKNTRLEYRMFWGKSKSA

SEQ ID NO: 930 - protein, 543 aa, synthetic construct
  REGION 1..543: note = Synthetic
MKTKENILCTCIIRKDTPAGLYFGDICRKTKALRNTTNFYIRNTYTGIAKSPEERTHHETEVLHYVFTGIQKCNVHKEALFFRDLKKARKKCGLAGEAVVNRSLHRTMETPYPSVKRRMLTYETLDAVFKFTKNRDYYRLPAQVNQNAMRKTFQSWKGYFAALKDWKADPEKYEEVPGIPGYIREEEATAWFTNQTARIWKTPNGCVLFFTGTSVTAGCGTFTGTYIKTEVQPYHGEYRLLVTYDDKAECPEVPEHPQRIYGIDTGVNNFAAVAGNFGSAPFLIRGGAVKSWNQWYNKKRAALMSGLTSGQDSRHSIKHSRRLDALSRKRDERMRDFFYKCAHYICRRAVKEQVEVIVCGHNDGIKQCVDFKKKDNQNFVCIPERRFLSILAGVGAKYGIPMVIREESYTSQASAPDLDPIPTYGREKGEEPVFSGKRIKRGLYRTGDGHILNADINGSANILRKEYPEAFKDVTDFSYLWKTTETIGYRDIYKAVPEKKKEDAGKRNRPGRGSRKRHKERAARRMELKEAFPKKRTFVKKAS

SEQ ID NO: 931 - protein, 477 aa, synthetic construct
  REGION 1..477: note = Synthetic
TAIFDVYDTSATKELFAYMDRLTASAKCMYNVANFHIRQLMTGLKKDPSERTPNEQGVIDKVTKYLPLINDRIAERNRKRATAGKKLTKPFAMPTAKKSFVGTNFLVAMFAMDNDPDYRSMYIQAAQNTVEECVEAWKSFFALKKAGDADAKIPRYKKKEHASVTFSNQGCWIENGMLRLPGTKTRFDVGSFPHCGDKLIEVRIVPYFGHYQIHILTDDLAEEPEKKDPCEPRNAMMIDLGVDNFATITDSIGRTPIAVKGGYLKSVNQNWNRMNARLKSILMKGHDPKVYHPENTKHMNAISARRDRIFRDMFYKISHFICTVAVSRSIDMIIVGKNTGWKQNADMGHRNNQAFVQIPHAKFISTLKVTAAKYGIEVFEQEESYTSRSSFIDDDPIPTYGNPESPYINLSGRRTKRGLYRTADGTLINADVNGSLNIGRKYDPWMFENMSFGERKCYASSTAVVGYRALHPESKGR

SEQ ID NO: 932 - protein, 542 aa, synthetic construct
  REGION 1..542: note = Synthetic
ARMYHVECIDIHKDDILFSYADRASLCANNMYNVAIFYIRNLMTGLKKEIRLRTENENFVIGTVTGSISGINDSLRDKYERKVRKIRETEGLSEEERAGRIAKVKHLQFSAPTTEKWFASYGLLDAVFKFTENPDYRSFHTHVIQNAIKACWQAWKGYFESLKTFSPSSGHTGKPKIPGYKKPGGRTTAVLSNIACCIKHGRLYFPYCTKECTDGKQEKKRTRHSLCIAGLPHAEKDKLIEVRIVPYFGNYQVQIVTDDGLKEEEFLPDERDIIAADGTPAGVMMLDPGLNNFAAIADNKGNEPIVIKGGAIKAENQWFNKRMAFLRSEQMKGHDPKTYHPSVTKQMQRISRKRDAFLRDTFYKYAHYICRLMKKRGLSYLIIGYNRGQKQGIDIGRRNNQSFVQVPFARFRRVLQTVCARYGIRVILQEESYTSKACFGSRDGIPTYGKGDTEGITFSGRRIGRGLYRQDDGRVMNADINGAVNTGRKYNESIYPEGMDCGYLYGTVKAMTYKDILSAGQRNHKSNPGETGQRASVCPVSA

SEQ ID NO: 933 - protein, 490 aa, synthetic construct
  REGION 1..490: note = Synthetic
ERTMRFEINNKNEIYDYCKDVCNKAKNMYNVANYYIRNTATALTKEANNISLTSNELEVITTVREMIKENNNKSSKRKDKEKTQLKIPDAKNKYLNYYQLNAIFLCSNNYDYRVLPVHSSQKAIKTCCEMWKSYFKAKKDYIKHPHKYSGEPKIPKYRKNNLATVSFSNQSAIIVNDENNNYLQLPSIKTYDEKGNLVQQDKVKYNLGKLEINNLIKVEIKPFHNIFYLLITIKDNDIKDIYNDENFKTKNIMSIDLGIQNFATITDNVGNNPIIIKGGFLKSRNQYFNKYKAIETSRIKNIYNSSIKLDLLSLKRNRFLRDCFFKIAHKICKTAKERNVNQIVIGHNTKWKESSNIGDKNNQNFVCIPFSQFISTLHTVALKYEIKVIETEESYSSKASFVDRDYIPTYKKGDNTKYKFSGKRTKRGLYISKEGIVLNADVNGSLNILRKYCGDEICKDITDYNKLNHIIVLNYKDFYPQYKSKIKTNI

SEQ ID NO: 934 - protein, 502 aa, synthetic construct
  REGION 1..502: note = Synthetic
DKNYHIIRKEILPNEKICSYFDEICSKSNNLYNVTNYYIRQLYIGTKKKNNNQQLTPNEQEVFDIVTNALPLLDEISVNNIKTKISKLEKALLLNPKDKTISKKLEQHKEKLLKFKPHSLSKSGFPSYKLLDGVFKVTNNADYRALPAQVNQQTMRECYTNWKSFFESIKKYKINPSKFTGRPKIPGYKKSGSKFKTIFTNQTSGFHFKNEQCSLWLTLYDEEISFGNYVKETDVLQQVEIAPFYDRYKVSLILQDKEYSEKECKPTRIMGIDLGVNNFATISNNIGINPIIIKGGMLKSRNQYFNKTRACYLSKLQKGKDSSHNQKNSKKLYTLSKNRDNFFRDSFYKIAHRVVKIALENEIDTIVIGNNIQDMKQNIDIGKTNNQNFVSIPFCLFIKILKYLCLKNGIQFIETEESYTSKSSLLDNDILPVYNDSDTNEYKFSGKRISRGLYQSKEGIILNADVNGASNIIRKADITAFENLDLSYLQSITVLSFKDFYK

SEQ ID NO: 935 - protein, 501 aa, synthetic construct
  REGION 1..501: note = Synthetic
YKSLDIEIHQNNKLYHYFRDMCIKSKNLYNVGNFYIRNTMTALSKEPTARNDNEKEVLSIIMKNLKEFNSTRMKSIEKELFKILVTEKDESKRKEAINKKKEEFKKYYRQENMPTKEKWFLDYNLLEGILKFSHNKDYEALPAQVNQAVLKLLIQNWKSFFKAKKDYSNNPSKYLGKPKLPGYKDNMMITTFTNINCKFQEENNNYYLRFPKTKDKLLVTKEIVDKGKFMQVVVKPFYGVFKVFLVFNTGTEELVVDKDPKRIFGIDLGINNFVAISNNIGTTPIVVKGKFIKSYNQYFNKRKAKLISILDKNDQERDTKQLNNLSRYRFNFFHDVFYKIAHYIIREAKTNNIDTIIIGHNNLWKNKSPMKKKDNQNFVSIPFNNFINILGWLCSINGINYIIKEESYTSKASFIDKDFIPTYGKEKGVAYKFSGTRVKRGLYKTKEGIKFNADINGASNIIKKAINSAFDEINDFSYIVNTIKVLNYKDFYKISIPRKRG

SEQ ID NO: 936 - protein, 634 aa, synthetic construct
  REGION 1..634: note = Synthetic
CPYDVLTLMLARPKGALEQVCLVLCHQAKNLFNTANFLIRQVTSAYQYDAQAKVNRLRPELQANQAAVIAHINAQIVSINAARKARHPEKVAKATSLNKEAPDLKLIPTLDAVMPKLAGTLLDATLLDNAARNWQSHDGDAVYKRLPAVMSQQVIGRLRDAYSSFFEALKVYAVAPATLTGRPRMPGYLPKHERFVIELPIAAISVKRGMEADGDKPATPDRGYLPSLKGKTIPVDYAETSVLDDETMAAFSAFDLVGAVNTACHKRGWKDGCTPQHVRIVPRRTGVKMEAVVRVPNAYPANSFLARLVQDHGPALAELTKEKERDKWIVNYLKDLPAKVLPRFAAIDLGTNNIATVAYSTGHQAAVHTGGHFDAVMATMNEVIDRFVSENTPLRARELQGKKNALRKEKHTLTKAEHRELGALLKPIYEEPRYQDLTARREVWKEQYLHRLSRGIVRHCADRGIEVIVIGKNARWKDEVDMGRQQNRRFCQIAHARLIEFIRYKAQLLGMAVVTVEESYTSRTSFVANETLACYGEKTPMAVPADSLTSLSSASPDVAPVTLATSCGKRSSNRHWFVHSQPRECLQRVHSDVNGAMNIGRKLFAQFAWHARLSLKFVLWRLSERCGVVPVQLQ

SEQ ID NO: 937 - protein, 604 aa, synthetic construct
  REGION 1..604: note = Synthetic
CDFVSLTLTLPRPKDELEKVLLALTHQSKNLANTCLFVIRNAFTAYEYDKETGLNVLKKELHSHQIDIIDHYNIHIALINKKRIDKHPAFIQKELAKGKALEDIREAKLIPLLAPVLSNLAAVLLDSTLLDNVVKTWSNEKHDIVYKRIPAVMAQQNLATIKDNFSSYFNAAKQYGKNPASMTGRPRMPKYHDKQGRAALEIPLVAVRTHLPTLKGKVVYEDYQENNQLDPELLEVFSRFSVDEMVKKACQKRGWTDYKAQHLRIVPLKKGLKMEVVVRVKNAYPEHSFLATIYQDHKDTLAAFKKPKEYSTWLLNHLKELPADQLPNICGIDLGIKNVGTLSYSTGHKAEVHSGAVINKTLGRLNYKIDSFLSSQASPRAKELQAKQAELAKKAERLTTEEHNELKKLQAAVYGHDTYQRLSNYKRQWLQNYLHQLSHGIIKNCVAKKIDVIVIGKNLGWKQEINLGKKTNRSFCQVAHATLIEYLTYKAELQGIAVVTTEESYTSQTSFVDNEELSIYDETPSTPEAKALRPAKAGKRSTVNRNWFIHKNRVDRLKIVHADVNGAFNIIRKVFKNFAYHVKLTLKFTIYTMNSKQGVLKLQL

SEQ ID NO: 938 - protein, 631 aa, synthetic construct
  REGION 1..631: note = Synthetic
KTYDTRTLELPAPKGEMLRVGEALTHQAKNLRNIGNFFIRQVLSAYDYDAGTQTSTLKSELHPLQRQAIGHINATIDAVNAKRVAAHPGKLATHAAKKACGEAVGKAPVLEIVPRLETKVDSPAKSVLDLTVLDNALKTWKDEKGNNVYRRLAATMAQQVVLRLVESYTGFFGGLKQFNDDPSDMTGRPQMPGYLDRNGRFVLEVPFVNVKAALPRPQKAVPVPENDFVLSPSHLTKDMLDAFYGYDIRKAVMDACLKRGWKEFSPQHIRIVPMRRGLRLEVVGRMPNPYPDGSFLARLVAEHAADLSKLKDDKARDKWLLAHLGGMAADALPRIAGIDPGRKNLATISYTTGCRAAVHLGGEFTAKMEDFSARIGRRVSELTGDRARELQAKKLELQKAGKKLNRAEGIELATLLKAIYQDAEVIRLTGKMNRWSGDYLHKVSTAIVRDCVEHGIEVIVLGRNKGWKNGGGMSRRENRKFHQVSHATLGRLIRYKAESHGIAVVETEESYTSKSSFVNGDTLRTFGEEPVQGAPADETHDEAATSTPAGESGAPAPALTGTRDKADRNRFRNHNRDDRWKWVHADVNGAFNIIRKVFGSFAYNDGLTLKFKLLRVSPRMGVTSVRLRPCA

SEQ ID NO: 939 - protein, 601 aa, synthetic construct
  REGION 1..601: note = Synthetic
IKAEKRVLRLAIPDREWSNVALALTHEAKNLYNTCTFLIRQINSAYVFNGETKVYRLKDDLHEYQREALISFNRIIEQVNAKRRLKQTDKTRFVASLEPVMSAVPLYIALDVTVLDNVAKSHVDHEGQIVYRRLPAAAAQQVVRSVIDVWKASLAAQRDFARNPGKYTGRPQFPGFKAKDGYFPLEIPYAMISKGLPKPAKLHELIGVSLKQQERFYAHDLKAGAVSACEKRGWQNAKPQHIRIVADGSEKVKIETVVSMSQAYPEGSFLHRLGVEHKDAFHGLKTVDEREKFILSTLGKDRQCLRIAGIDFGRTNIATVGFSTGHRAVVHSGERPNEIVEHYHKLMDKRLAACATPRLKELQRLKQELEAKGEKVSKAQRIELRQEQKRGFSDPEYRALSSRLNRIKSDFEHKISTDIVTQCVKHKIDLIVIGKNKGWKSDIDSGKAENRRFHAIAHARLISLIRYKAEACGIGVVTTEESYTSQSSFIDGDELPVHSKVKKKTSTASAVDPGQTTTEADQPVPKHNFSGKRSAKNRTWFVRHNVVAQKRFAKVHADVNGAFNIIRKVFSNFRHHAGLTYKFTVRWISPRRGAVVPIGCL

SEQ ID NO: 940 - protein, 579 aa, synthetic construct
  REGION 1..579: note = Synthetic
IDRSVRTIVLPVPNKEWSSVASALTREAKNLYNITTFLIRQVVSAYEFDAEKKISRMKPELHANQIDTIDRFNAVIDVVNAKKQSKSEKAKVIPRLEQDMARAPLYTVLDLTVIDTMVRSHIDSDGSSVYRRLPAASAQQVVLSVVDVWKAALAAMVAYAKNPDGFTGRPGFPDFLAKDAHYPLELPYAAITTGFPMPRTLRPLGVVSVEAQKAFYAFDIKAAIATSCEKRGWSDYRPRHVRIVGANKSLKLEVVIGFNQEFPEGSFLHGLFETHAEVLRTHDTIEKREAFLQEHLAASNGLKIAGVDPGMNNVCAVAFSTGNRGMVHDATRLLAKMQKFNAKLDEMLAALTTPRIRELQQKKSSLAEIGGKLSKAERIELRSAQKAIFADPEYRQIVRDKANVKMDFEHKISRDIVETCHRHGIDVIVIGRNKRLKEQSLGAETNRSFHNIAHHRIVSLIRYKAEAYGIAVVTTEESYTSQSSFVDNDPLPTYQEGKKNEVIFSGTRSTKNRNWFVRRNDVVKSERLRKVHADINGAFNIIRKLFKSFRFSGRLTFKYNVRWVSPRIGATGPMSCRMA

SEQ ID NO: 941 - protein, 763 aa, synthetic construct
  REGION 1..763: note = Synthetic
LPSGDTSKSLARKPVKVVSAKRSESAAKTVKPAKTPKPKKAPKPPQIYRTQKANLPFELAPAIAALSRHARDLHNTTVYATRQIRYAFAWDKDAKESLSRDDAEMGKELAASSQLSILRFNQQIDALNVERAAKANMKAKETAEVAEPKLITRIESSGRRLESRILDMTLLERAMKAWPDDLALDKAPAFSKLPFLIARNVVKDIRSAHAAWLAALKVWSPTTGKGLAGQPKAPGYRKSSGLAVSLDWANKAKLPDLSALELFVDEDKGVKLTAEQAKAFRDFDIKAFADQALARRWADKPSWLAARPTHMDVAMLRLVPARGGQPPRLEMIVAIDKPKTPAGSFMASLESRHPALWLAAKPDAFDGWIAQIMAEQDWVKKKTPPAIGFDYAWVSQNHSAAFVDFGVTNLAGVAWTDGSKTAVLTGTDFHSRMDRLDGRIDRRVATLTTVEQRELQAKLSKLREADPKAKLSQAERSKLKGLSKLVHQDLGLMAMRKRRADFVKDRAHRLADWIAQAALSKKVAVVIVGRNIGWKQESNMGSERNRKFHSIPHGLMIQLLREKLAVLGIALLETEESYTSKMSFLDSDPLPVYGSKSTKVKEGNKEKENKTTNERDDNPFARNPAASHAAPADGPKASGVRGAGRDRNWFFRQGPKPAPDHNMAKAKAAPIRSKIHADANGAFNSGRKICPLFKAHDRLSPKHELWGFSPRGGFFPLSPFLKRGPVKSVAAALKAKAAKERKLASKNSIKVAEAVGGPRLESL

SEQ ID NO: 942 - protein, 573 aa, synthetic construct
  REGION 1..573: note = Synthetic
IYRTARIKIRNPKLINVFKAQLLSAKNLYNIGVFIIRNLLSCFLDGVLKTELHENQRQVIELVNNSINIINANRSAKKALDPEYKPKLFDLIDSNSKSPWVILDSSLLDHILRNYTYEDSIPFASLPAKVSEQIRITIINNFKNWLAALKIFKSTPANFTGRPKMPGYLEKSKLHTITYPVASLGANLPTIEKRDLYMDFNQKTPLAKDDISEYDLVEILELSKKLASKLLFGGSKELVELRVVTKGSIGFETIYIEGVFKLELDLAPSVLSDLLPKALELKENKRNAYYLDNLPNTNNIAGADLGLNNIISLAFGNGADGVVVSNSRIENKINIFDTKIDKLKATLTTDRQKQLQALQEKAKKDNSKLSRAEFIELRILQKAIYNNKEYRELLNNRSDWINNVLHDVSKGVVDILVKNNIQVLVVGRNKGWKEDIELGKVFNRRFYQTAHLKLIQMLRYKCEEANILLVETEESYTSKRSFANNTPLSIYGKADPQQIDNGGVRAKNVYKTNIESRWSKIHADINGAYNIIRKVLPSFKVNLILSSKFVLYWVYRGLKIFKLKPGRGSLAST

SEQ ID NO: 943 - protein, 376 aa, synthetic construct
  REGION 1..376: note = Synthetic
MDFNQTVPLAKDDIAEYDLIEILGLSEKLARKLTFGGSKELVELRVVPKGGIGFETIYIEGVFKCELDLAPSVLSNLLPKVLELKDNKKNEFYLNNLPTATNIIAGADLGLNNIISIAFGNGSDGVVVSNSRIEDKINLFDTKIDKLKAELTTERQKELQAKLEQAKKDNTKLSRAEIIELRTLQKAIYSNKKYRELMDNRFDWINNVLHDVSKGIVDILVKNKIQVLVVGRNKGWKDEVDLGKLFNRRFYQTAHLKLIQMLRYKCEEANILLVETEESYTSKRSFAKNTPLSIYGKADPQQIDNGGVRAKNVYKSDVDSRWSRIHADINAAYNIIRKVVPSFKVSLILSSKFVLYWVYRGLREFKFKLVRGSLAR

SEQ ID NO: 944 - protein, 457 aa, synthetic construct
  REGION 1..457: note = Synthetic
LTERIYVKENKAMNDLCHKQTAVYNQALWYLRQEFFNLGDDWKIVTNKNGEEKQVSAGFLTFYDLNDKSMLKWKQCYRDAIPLCAANTIQRVCDSWKSYWKALKAYSKNQIDFTGKPKMPGYISKNDKSPVYFTYVQFSIKDKLIHFPRNTNFGDIKIPRLNDQNYKQLPIVKQIRIIPCKMGGYWVECVHDVSIEPADVNEENVMGIDLGMNNIATIVDNLGNQPIMFSGNEAKTINHWYNIEIAKLKKNFARSNPRLAELQRKRETGLSPDEWHELKSLLQNTKQMNVITEKRNRRINKIFHDISKRIIDIAVERKIGTIVVGHNEGQKQNLDKGRRFNQNFGQLPIFKLIQKLRYKAELHGINIVEITEEFTSKASCIDGDDLPDRRTVKKKENGHSDIEFSGKRTKRGLYISKNGTQIHADVNGAYNILRKGCPEALGLNGMGARLYPKQETI

SEQ ID NO: 945 - protein, 481 aa, synthetic construct
  REGION 1..481: note = Synthetic
DKNYRVFRCIIKPTHTFYEPFLLVTHLAKNLYNIGMFYIRNAYSGAIKSPQDRFLNEANVINDLNGVIDQLNEIRLYDKKTKQKKKKPGKMFSKINEENRFVSYELLDGLFKVMNQVDYRALHSHVAQQVLRMLMRDWDSFFKILKKYRNDPTSLKAAPHIPNYADKNGYKTATFTNLSCDIRKDKKGGYVQFPKIVKKHGFPSDRFYIGKLDMMDKDFKQIRLVPEEDHIVMEIVYEIKAVEDTVDVETTERIAGIDIGVNNLASIAFTTGHQPVIVKGRKAKSVNQRYNKVMAHLQSEHLKGKKQETHIRTKRMKRETRRRNNQMDDFMHKKLRKIVDTCMEENVEVIVIGNNKDWKQNINLGKKNNQNFVQMPFQKFIKMIKYKAEAAGIKVMITEESYTSKASSIDEDQIPCYGEEEKEYTFSGKRIKRGLYRSKEGILINADINGASNIIRKVYPCKPKLKERWYRGTVNVPVMCI

SEQ ID NO: 946 - protein, 469 aa, synthetic construct
  REGION 1..469: note = Synthetic
TVYRTRQYRINRNNDLYDYCCNICLASASLYNRANFILRQYSSAVEAMNSYKPLFENQMKVFRIVSDSLYGTKYEPKGQWLSYNSMDYLLKSTNDRAYYGMPSQANQQILKLLMRDYKSFFEAVKAYGRDKSAFTGRPHMPGYVRNGKMKTAVLTNQICRIKDGKLLKFPGTKEILELGDVSFSWKLKEVRIKPSGRDFVIDVVMEMENKGIEPKDDSSILKELREMDDISDMRVMAIDPGTDNIAAVVNNFGNRPFVIKGGIVKSINQLYNKGIGRLSSCAMTCNQRYRTRRMEILTGKRNRRIKDQFHKISRQLADYARDNHVDVVVMGHNVFQKQEIGIGHIGNQNFVQIPMLVFADMLRYKLEEYGIRFVLTEESYTSKADFLAQDDIPVYKKGDNTEYVFSGKRIKRGLYRHFDGTVTNADINGAANILRKVFPKVTQWDRGIVDMPCSAGCVEHTAGSCREAA

SEQ ID NO: 947 - protein, 508 aa, synthetic construct
  REGION 1..508: note = Synthetic
EKTYRTIQFVVKSGHPLNEYFMDMMYKSNNLYNATNFHLRQLWTALKVEEGKSIHPLQQEVVDLFKSTIPKVNKNNTEKFEKLATKDILEAKVFDSRSKRKVTRFNMPTRDNSFCSYELMDAVFKTSNNKDYKSLPSHVNQGVMKQVYSDWSSFIEGAKEYKLNPSKFKGRPKPPRYKTKGATNSVIFSNQVCKIKDGKYLRFPKTKEVFNLSKHLLQRIDNAKLVQVRVQKFYDDVKLEVVLDCSKEAKPLIKKEDIKNVMAIDLGVNNLATCVSNNGMKPIIINGRALKSINQYYNKLRAKLYSDLRLNKNPNEGSFTSKRLEYIDMKRHFKVKDFLHKASKQVVDLALCNNIDKVIVGYNSSWKEDVEMRKDNKQTFINIPFSTFLDMLEYKLNAEGIHFEKFEESYTSKASFLDNDPIPTYGDKNIPKFSGKRVKRGLYISKNGIAINSDVNGACNILRKHFKEDIEISHKILSNVRKINIANGSKKIKSTLDILFNKKKLSLT

SEQ ID NO: 948 - protein, 486 aa, synthetic construct
  REGION 1..486: note = Synthetic
VYHRSFQIQIKPGHKLYDYFVQNCMNAKNLYNATNFHIRQIYSAYKSPRPLHALQQEVLDHVDEFFPSMNEVQRKAHEKRLLKQQEKMQKGESVKKPSTLNLFVKPNKEKSFVDYNFLDAYFKASKNVDYKSLSAHTAQAMMKKAYDAWKSFFEANKRYNTSEENKEKFSGRPKIPGYKKQDMTTTYFSNQECVIKDGKYLKFPKTKTHLNIGKLGVLSDGQKLVEVRVNPYAAIFIVEVVFAYKEKNETPQDYIDGGNTLSIDFGLNNFAACVFSEGQTPFIINGRGLKSVNFYYYKKRQHLVSTLRIGKKDQSGQHTSKRLQRLDLKRRNKTRDFYHKASKEIIERCLQNDVKNIIVGKNVGWKKNASMGKSSNRDFCHVSHAMFVDILKYKAEQKGIFFAEVEESFTSKASFIDKDFLPVHVPGEKNKHTFSGTRVKRGLYIAKNGTKLNADVNAAYNIMRKLSSRNFEGVEACVTQPQKIGL

SEQ ID NO: 949 - protein, 500 aa, synthetic construct
  REGION 1..500: note = Synthetic
DEMYSAYKIQIHKEHELFEYCDTLCFKAKNLYNITNYYIRQVYTAVKKDTRNENQLQVLMDIETHLPKMNKIRKKSYEKAKAKPKKIDKNGNIVNPELKLFEMPHHEKSFIGYGFAEALFKVMKQVDYTSMPPQSNQQTMKKVYDDWKSFFEASKKYKMNPASFTGKPKIPKYKPKNGRTTCYLTNQITKIKDGNVLKLPGTHLPLKLGKVAQSEGKLQQVRILPSYGRYVVEVVFKGKQDKEIQRSEKKINELVFEPKRVMGIDLGVDNLATIVDNTGRKPLLIKGTWLKSINQYYNKLKAKYMSILRNGKGPKEGIFTTNRMISLDRKRNNRVMDFLHKASAKVVEIALVRNIDTIIIGRNVGWKLEVDMQKANKQTFIQIPYATFIEMIRYKAERKGVQVIDREESYTSKSSFLNQDPIPTFGEEHQTIFSGYRSTRAFYKIKGSKVLIHADVNGAYNIVRKHVKDAFEGLERRQFLQAPQKILIMKNRHAKLKASA

SEQ ID NO: 950 - protein, 466 aa, synthetic construct
  REGION 1..466: note = Synthetic
MYNVTQFHIRQVMTGVQKDKACLSENEKHVFATLEQCLVQLNEIQETTYEKKCQKAVLEEKDLPKKPTPHQMPTTEKWFLTYGLLDGMFKLSNNADYRSLPTQTSQAMIKLVLQDWTSYFESIKDFKHHSSKYLGRPNLPRYAKKNGRKVATFTNQDAVIRHMKESFTHHELKLPKTKLTLPLGDLSHCDTTDLKEVRIVPKGTDYVIELVCQLKHIQTLGTKETATRIASIDLGVSNFVTMSNNIGEAPILVKGGILKNKNQFYNQQRAHYYGILRLGKSPKEEPFTSKRLNALDRKRHDFMKDYFHKVSKQLVMYCLDHQIDTLVIGKNDGWKQHVNFKKKDKQNFIHIPYNVFIQTLTYKAEQAGIFVVETEESYTSKASFLDRDALPIYQENNTTKYTFSGYRVKRSWYQSKQHGRIHADVNGAANIQRKVFPQVGDSHVWDTGVLKTPIPLSVSYASKIQK

SEQ ID NO: 951 - protein, 482 aa, synthetic construct
  REGION 1..482: note = Synthetic
DKILRTQSIRIKKGHRLYTYCDSMCFLSKNLYNTTNFYIRQIFSGLKKDKVSRQDNEVKVIKEINDVIQTLNDIKIAYVEKRRLKELQKPENQKKKIADAKLFESLTEENSYPSYGLLDGVFKTRNQVDYISLPSHSNQHVIKLVFQDWKSFFEASKDYKKNPDKYKGKPKPPRYAKKNGRKIAFFSNQTCVIQDNKYLKFPKTKEKINLGKLGQIEGSLKQVRIVPGHTYYTIEVVFELQEKRVPLKETPERILGIDLGIDNFATIVNNVGQQPIIIKGKVLKSINQYYNKMRAHYYGILRQGKTEKQGPFTSSRLDKLDSKRRDKVKDFLHKASFNIIQYAVGLNIDTIIIGKNKDFKENVNLRKDIKLNFKGIPYSMFIEILIYKANMKCIKVIITEESYTSKASFLDNDHIPSYKDKKEEKLQFSGKRIKRGMYKTKNDILINADVNGAANIIRKVVPDAFGKGNRGVVSTPLVLSVA

SEQ ID NO: 952 - protein, 337 aa, synthetic construct
  REGION 1..337: note = Synthetic
LEIFFASLKDYKKNPNKYAGTPRIPKYIRSSEKEILYTNQDCIIKNGRFLKFPKTKLQLNIGKLGFTEGKLKQVRVIPKYNEYVVEMVIDVPSEQQIIEENARYMSIDLGIDNLATIVTNTGMKPVLVKGKHVKSINQYYNKMKSHFTSILRNGKQTNEGPFTSKRIEKLHQKRYLKIKDVFHKVSHHIVKLAQEEVCKIVIGQNKSWKQEMNMGKRNNQSFCHIPHSLLIQMITYKANAVGIQVVVTEESYTSKARFLDNDFIPTYGENDQNTTFSGKRIKRGIYRSANKTLIHADVNAAANILRKVIPNAWTNGIEGVGVKQLANVLTPLTLIVR

SEQ ID NO: 953 - protein, 479 aa, synthetic construct
  REGION 1..479: note = Synthetic
ALGYRTYQVWIKPGHRLFAYLDALGQCAKNLYNTANFYIRQVFTAKGQLSACQPLQQQVMNTLSAHLDAMNERRSVKNRSRPFTLPSPEQPFLSYSFLDALFKVMEQPDYRSLPAQSSQGILKVVFQNWAAFFASMKAYRQHPETFTGKPKIPGYARSKVKEVVFSNQDCVIKDRKFLKFPRTKLRLNIGKLGRTDGKFMQARVVPRHGHYVIELVFTCPMEEQNTEGEQVPDVSHSNFIMAIDLGVDNLATMVTTTGLQPVIVKGRIVKAINQYYNKMKAHYTSILRQGKNPREGTHTSKRLERLHLQRHRLIKDLFHKASHHIVRLAEEQRIGTIVIGHNAGWKQESAMGRRNNQSFCHLPHKQLIAMIQYKAAAKGITVILTEEAYTSKASFLDQDPLPRFGEGGTYLFSGKRIYRGLYASQAGVIHADVNGAANIMRKVFPNVSAKPSDGIEGLDGNQSINVSTPRVLSILKPSG

SEQ ID NO: 954 - protein, 480 aa, synthetic construct
  REGION 1..480: note = Synthetic
KNVYRTQQIRIKKGHRLYPYCDQLTFLAKNLYNATNFHIRQIFTAFGEGKNLQPLQQEVFYLIDQHLPQMNAIKRKTVEKKRQKELKKPVDERQEIQDAVLFEYPSAQQKWPSYAFLDSLFKVSENVDYLALPGQVNQQVMRRVFQNWKAYFASLKEYQVHPHKYTGRPKIPKYAPKNGRIACVFSNQVCKVKDDKYVRFPHTKERLNIGKLGLKGPLQQVRMIPTYGEYTIELVIRKEEEKPLVELDEQHIMGIDLGVDCLATIVDNTGSSPVIIKGQAVKSINQYYNKQRAHYSRVLRHGKGPKEGSFQSKRLQRLDQKRFFKLKDAFHKASFHIVQLALARKVSTIVIGVNKGWKQKVSLRKQDKQHFQTLPHAMLIRMIAYKAEAYGIHVHQQEESYTSKASLVDMDELPLYEKGVPAKVRFSGQRVKRGLYRTKENTCIHADVNAAGNIIRKVVPNAFAKGIEGVVSRPLMLSIV

SEQ ID NO: 955 - protein, 472 aa, synthetic construct
  REGION 1..472: note = Synthetic
AIVYRTAQISIKKGHKLYGYFDDLLIKSKNLFNTSNYYIRQLLTYFDKCLPSSNEKEALNYINGNIDALNAQRLKKYLKKVENGSTKGKFKTFAPVSKEQPLTYELLDGVFKVSKHPDYYGLPAQLNQGVMKLVFRNWKSFWKSISDYHKHPHKYNARPKIPGYSKNPNKSMLILTNQICKLKGKYLRFPKTNLTLNVGKYYSDIGTLKEVRVVPKKDILILEVVYAVEIDVVPLNPNNIASIDIGVNNLVTMINNVGGRPIIVKGSIVKSINQYYNKTKAQYTSTLRSGKNHKQGTFQTKRLSKLDRARHLKIKDYFHKTSYQIVWECKKHNIGTLIIGKNDQFKKNVNLQKKDKQNFIHIPFVMLINMIRYKAEASGIQVIVHEESYTSKASFLDNDPIPTYGDAFEGRFSGKRIKRGMYKTKEGHLINADVNAAYNIMRKVVPNALSEIRDRGVGLRAIMSTPLVLEIA

SEQ ID NO: 956 - protein, 534 aa, synthetic construct
  REGION 1..534: note = Synthetic
NKKISQTNKLENSENKNMNDKQKNENILKRVSIYQIKTKHPMFSYVDSNTFYGKNLYNLANYYIRQCFINHSKDEKDLTQEQKDLIENINKYIKKYNEQYANNFRKNNKKNLIKYMKKYNLLKTQENKENEILALDEKINKLFKKRMNLQVEISKENGLLSYNFLNYYFAHCLNTEDNPYKTLPIPTAQQVLRYLEKNWVSTFKSMKKYAKDSSNYTGRPKLPKYKKKDGRIKISFTYQQCKIKDGYLTFPKTDLTIKLGFDYSGLILKEVRIVPMGSIYKVEVIWNKQKQEPLKYLNVSSCIAIDLGVSNIATITNNIGDNPIIINGRKLKHINHCYNKEKAKLQEKLPFVENWKGDLEQLHWSKLLSRITKNRNNKMDSGIHKISKYIIDYCLKNKIGKIVIGLNNTWKQNINIGTKNNQNFVTIPFRTLINQIIYKAEEVGILVIVREESYTSQASFLDLDEIPTYKTGDSTTYHFSGKRIKRGLYKSKDGTYINADVNGSYNIMRKEFPELFTKDTIKTFKIKPKKVNIL

SEQ ID NO: 957 - protein, 522 aa, synthetic construct
  REGION 1..522: note = Synthetic
LSLNRVERHFISKNHELFTLIDDLSFKSKNLYNLANYYIRQTYIITSKLKKGEEINSEQLVLLTWINSKVDAFNTYKKNNLRKRQKKAEAALKNKSLSDESKEKNTKIVAKEYKTFSYFGIEHKYLGYDFLEFIMKDTDAYNALMAQVSQQILRLIDNNWHSFFEAVKDYKINPAKYKGMPKLPKYKHKTKGRFNILFTNQGVVQMKGYIKMPKCLKQYKLNSKMQGKLQQVRIKPVFGQYLLEVVYRKNFKVKNSEELQSKRICSIDLGIDNFATIVNNIGLEPIIIKGNSIKSANQYYNKRKAELQSKLEFITINSKEGPKKVQSSTSTRINRFTLKRNNIIDDFMHKASRFIVNYCIKNNIDTLVVGKNKSWKQKCNLGKTNNQNFVQIPFNSFIEKLRYKCQEVGIKFIVLEESYTSRSSFIDNDELPVYGEGADYSFSGKRIYRGLYRTRGGHLINADINAAYNILRKYDNIFSYTKNIKLTPRKLDLIKAKTVEDKIYANYCRELKEKMHKAKRVV

SEQ ID NO: 958 - protein, 379 aa, synthetic construct
  REGION 1..379: note = Synthetic
MSKLTNALRNQSIYLMRQHLRHKEDDDPFFICLDKLLKTMPDEYNIYRKLPAQTSQQTIRVVEQSFRGYSSLIKDWHQNKEKYSGKPRMPGFGHRDAQHQVIFTNQQINLVDGKLTFPKCLRPFSLKLRAKNVTKICQVRCLPRLDSFKIEVIYEIDDPIELPHENVAAIDIGLDNFTTLVFSHPVAPCIFKGSKAISYHLQHMKKVSELQSELWRTQKSHHQSKRVRRLREKRQRYFQDVMHKLSHSIVNQLLENNVTTLIVGHNSKQKEGSRLKTFTKIPIFGLLKKLEYKCKKAGITYKEVNESHTSGTSFLDGELPTADYYDKSRRVNRSTFITNSGKKIHADVNAAYQIMRKAFPSLHIDYDSSIFNPRVIHFH

SEQ ID NO: 959 - protein, 247 aa, synthetic construct
  REGION 1..247: note = Synthetic
VTKICQVRCLPRLDSFKIEVIYEIDDPIELPHENVAAIDIGLDNFTTLVFSHPVAPCIFKGSKAISYHLQHMKKVSELQSELWRTQKSHHQSKRVRRLREKRQRYFQDVMHKLSHSIVNQLLENNVTTLIVGHNSKQKEGSRLKTFTKIPIFGLLKKLEYKCKKAGITYKEVNESHTSGTSFLDGELPTADYYDKSRRVNRSTFITNSGKKIHADVNAAYQIMRKAFPSLHIDYDSSIFNPRVIHFH

SEQ ID NO: 960 - protein, 395 aa, synthetic construct
  REGION 1..395: note = Synthetic
DYRTQTYLIDMTDEVYEMCLASKSLYNQALYLLRKHFFETDKTLSISELDKLVKKTNEFHYRKLYVQSAQATIINCRMNIVRYFKAMKTFYENWDASQKLPQFPTYLGNQDLYDVILTNQLIKLVGDEVYFSKRLGLPPLKLKHVDGKLLEVRLKPLSLHEHSSRKRMLEAQVVFLKEMDVDFLENGNVAGIDLGLHNIVTLVSTSASPILISGDKMIRYQHRFNHKLSRIRENGGTDSIRAHKLFYKRKQFMNDELHKITKTVITYCLENDISTLVIGRNKTLKNDTYHRIFKQLPIHRIVEILDYKTKEYGITLHVTEESHTSGTSFLDDELPTSTYYDKSRRKHRGCFISNDGIRINADVNAAFQIIRKVFPDVQFDMQTKVRSLNPKLLKI

SEQ ID NO: 961 - protein, 397 aa, synthetic construct
  REGION 1..397: note = Synthetic
VKFVLTYQRYLKRDNPIFSEIVRMSKKANNLYNQAMWLMNHEKKVHGKTLSYGDLDKITKQLPSSYNNYRLLPAQTAQQTLRQLDSNVKSYWAALKDYQKHPEKYKAEPRRPRFRQKRGRSPVIFCNQQFRYDGINIRIPSLGNFLMCFEIKNATPKQVTFLPHGEIFKILVSYETSEQSDYQGNGLVASIDPGLEILSAVAFSDMSQPILFSGKKAKDYNVHFNEKMARVQSELKSTTGKHYSKRTKSLWRKRKGFFDNHMHQVSRKLVNLLAVKGVSTLIIGKNDQQKQKNKIKNFVQVPIFRLLELIKEKAERLGIEVIVLREAYTSGTSFLDNEKPIKANYDKTRRVKRGLFISNEGRKIHADVNGAYQIMRRAVNVVWDGTTNIFNPQTVTC

SEQ ID NO: 962 - protein, 399 aa, synthetic construct
  REGION 1..399: note = Synthetic
LITKLVEKHKVYKSHPSYSKLDEMSRKANNLYNQCVYFAKHSDDLSEDLKNLDKIMKSFPDAHDNYRSFGYARCAQQVLRLFQQNLRSYFAAINDYKKNPANYTGRPRFPKFRKSGERFQVIFTNQSAKLDDRCVNIASRVFENKLSIKLRTHSAKKICQVVFAPRNNYFLVCVIYEVDPIISKNTNKLAAIDIGLSNLATVTFSEEDDPILYRSDLTKINHDFNRLTSNYVSILKKTQNKDTSKRRKRYSEKYSGLVEDRLHKISRAIINDLSHRGVSTVIVGKNTGQKINNKLKNFVQVPLFRLIEMVKYKAELAGITFIQVNESYTSGTSFLDNELPTKEYYNKSRRKYRGLFLSNDSKRINADVNASFQIMKKVYREFTHTNSVKYANPIVKTIC

SEQ ID NO: 963 - protein, 403 aa, synthetic construct
  REGION 1..403: note = Synthetic
YLVEKHKIKSSNKYFNRLCELAKISNNLYNQSYYWLRYSLENFGEWYNYYDLDKFMKQYVRVITPEYGNYGQLPAKVAQQTLKTVTQNMKSYVKSIKDWKKNRGKYRGMPKLPRFRKSNDMYILIFTNQSARLKSDNVIYFPKQLDGFTIELREDSIEKIQQVRIIPKGLYFIVEIVYEVPNHPLQETNERVAGIDLGLSNLATLVFDDFSRPVLYNGKPLKSVNHYFNDKVSEYKSILDKTQKDQGTSRKLKQLYNKRNDIMDNCLHQISRHIVNLLVEKGITKLIVGKNAGQKQKNKMKNFVQVPVFRLLDYLRYKCERVGIEFIVIDESYTSGTSYMDGEEPINEQYNLKRRISRGVFITNNGKRVNADVNSAYQILKKAEINVPYQGQTTIFNPIKITI

SEQ ID NO: 964 - protein, 395 aa, synthetic construct
  REGION 1..395: note = Synthetic
VEIHKIKKSSKYFNLLTDFCKESNSLYNQALYNAKQSLYKNNKWLFYNDLNLVCKNQPIKYNNYIKLPRQCSQQVLKLLDKNLKSYLNSIKDWSKNKSKYQGMPKLPNYRKSGGLFQLILTNQQCKLKNNNMIAFPKVFNGLTLKLRKEYVNKINQVRILPKINCFKIEIIYEIDDAKLKDNQNIAAIDLGLKNLITLVYSNNKHPMIYKGNQLLKLNHDFNRKKNKYQSILAKTQKKKMSKRLLNIYNKRNNQIEDQMHKISKSIIDQLLENNISTLVVGHNVNQKQKSKLKNFVVLPIFKLIQLLKYKCKLNGIKLIEINESYTSGTSFIDNEKPIKNNYNKNRRVKRGLFKTNNGQLINSDVNAAYQIIRKYNNNIEIEYDNKIFNPQVMSA

SEQ ID NO: 965 - protein, 414 aa, synthetic construct
  REGION 1..414: note = Synthetic
IVVENQKLKKMKENKNVSYRARVHYIVPSQELINQARLSNNLYNQALYILRQAFTNEKDIPSKFDLINTLRHKEYECEEYNNFGKMVSDTAEQIIILASQNFKSFLMALKAFKKNKSNFTGIPKIPGYNKKEQEFVIIIRNTLCTVKDGMMRFPKKLNLDKIYVGDLDIAHVRIFPGKKKYKVEVVYKVEALPKKTKGNIAGIDLGLDNLATVAINKRGIRPLLINGRPLKSMNLYFNNKRDKVQSELKKCNDRYMSHKLETLYRKRNNRFNTYMHKASKKIIDYCLEHNVKQIIIGHNKLQKQKSKLKNFVAIPTFRLIELIKYKAEYQGIEVIETEESYTSITSYLDKEEPIKDNANKARRIHRGLFKSNKNKIINADVNSAYQIMKKVIGDKVIKPIGKGVVFIPRKVTIA

SEQ ID NO: 966 - protein, 279 aa, synthetic construct
  REGION 1..279: note = Synthetic
MLIIGAQQCAIKDGMMRFPKKLNLDKIYVGDLNIAHVRIFPGKKKYKVEVVYKVEALPKRKKGNIAGIDLGLDNLATVAINKRSIRPLLINGRPLKSMNLHFNKKRNKIQSKLKKCNDKYMSYKLETLYRKRNNRFNTYMHKASKEIVDYCLEHNVSQIIIGHNKLQKQESKLKNFVAIPTFKLIELIKYKAEYQGIEVIETEESYTSITSYLDKEEPIKDNADRFRRIHRGLFISGKGKRINADVNSAYQIMKKVIGDKVIKPIGKGSVFIPKKVTMV

SEQ ID NO: 967 - protein, 429 aa, synthetic construct
  REGION 1..429: note = Synthetic
KRVEKHKIRKSNKYFPFILEQLEQCKKISNSATFIIRQNFFFNKTKDSKGNEVRKYIKYNDMDRIFKRDRTELYRSLIYVQSVQQILRKVHSSFDSFFKAIKDYKKNKSNYTGRPKLPKYKSSKYDELIITNQNFKQNDKVLNFKGYLKDLSFTMYNIGKANQVMFKYNGLDIDVYIIYDNSKTLINKEVVNYIDDDSRIISIDLGLNNLVTITNNIGIRSIIINGKGLKSKNIYYNYQIGKYQSILATVNEKDKKKKSYKSNRLTRLRVKRNNIMNDYIHKTTRYIINYCKENNIDTIIIGNNKFQKQNKRKKQLKGLKNFIQVPIKRIIEQLRYKLEYENIRLIETEESYTSKTSFLDNEIPNKETIPKGKRIKRGIFKRPNGEYVNADVNGSLQILSKVISTRLLEQLRKVVSSNGLALNPLKIAL

SEQ ID NO: 968 - protein, 407 aa, synthetic construct
  REGION 1..407: note = Synthetic
ETVQRVEKHLIKKQDPFFPMLMEFCHHSKNLYNHANYFIKQEYRVNGKWLRYQELDKRLKVDMKFPDYKEMPTAQSAQQTLKLLDKNWKSFYASMRDFKKHPEKYLGRPRPPKYLKKDGVYTLVLTNQNCKFDGEMIYFPKVFHGFTLKPMFVKNEKFVTFNQVRLIPHKDRIVLEVIYSVLPMPMKEENQRYVGIDLGVNNLATVANTIGKEAFLINGKPLKAINQFYNKKNSHYSKVCQCMNDKDYSSRRNRLTEKRNAKINDYMHKASKYIVNWCVNHDISAIIIGKNREWKQEVSMGKKNNQTFVEIPFARLIEMIQYKARDYGIAVITTEESYTSGTSFIDNEEPTKEQYNKARRVYRGLFKANNQTQINADLNGAYQIIKKVFPIKWDRGCALHPVVVNLG

SEQ ID NO: 969 - protein, 427 aa, synthetic construct
  REGION 1..427: note = Synthetic
DSLMRVERHLIRPSSPWFSMIGEFCHLAKNLYNHGNYLVRNRFIKNGQWMRYDELDKALKTDVDYPDYRAMPTAQAAQQVLRLLDKNWKSFFAAIKDWKEHKEKYLGRPKLPKYKEKNGKFILVLTNQNCRLKGAEVIFPRSFRGFKAAPEFMKDKESQREFDTFQQVRFIPDGTNIVMEIVYTIKAAPQKEDNGRYAGIDIGVDNLLTMATNTGMAPLIVNGRVPKSINQFYNKKLACLKSVCQQMTGQYSSNRIRHFTAKRNRKIADYMHKASKLLVEKCAELEINTIVIGQNKEWKQESKLSRRVNQHFVQLPFARLIQMIEYKARERGIAVILTEESYTSGTSFLDKEAPVKENYDKTRRIHRGLFRANNGRLINADVNGAFQIMRKVFPNVSADGIEGVVLRPVVVVAAYPILGLSRAVNEQ

SEQ ID NO: 970 - protein, 411 aa, synthetic construct
  REGION 1..411: note = Synthetic
EPRVERHIIDRQHKYYKMLKEKCHLAKNVYNHGNYIIRQEFTKNGKWLRYEDVEKIVKSDLDYPDYWNLGLANSSQQILRTLDKNWKSFFKALKRWHIDKTAFCRKPKIPKYKKKDGLCTFALTTNQAKLKSDNLIHFPKTMNGFTIKPNFINKPYKSFQQVRIKPENDNIIVELVYTINVQPLIITDKNNYLGIDLGIDNFVTMVNNVGCPAIIINGKGLKSVNKYYNKLVVKEKSKLDKSKNSKVLYSHKLYSITHKRNNKINYFMHKASRYVVNYCLEHYINNIVIGHNKDWKRNSNLGKVNNQTFVQIPHKRFIDMLDYKCRENNIKLHIVEEPYTSGTSFLDNEKPIESNYNKERRISRGLFKTNTGKYINADVNAAYQIIKNVFCNVEIPADIGLVMNPVRINLC

SEQ ID NO: 971 - protein, 415 aa, synthetic construct
  REGION 1..415: note = Synthetic
RVEKHKIKRKSEYYELFEHFSINCNNLYNHANYVVKNKFKEEGVWTRYGELDKILKNDLEYNDYRTVGSTAVAQQCLRLLDKNWTSYFKALKDYKKHPDKYSGCPKMPSFRPKKDRNILIFTNVAARLTKDGYIRFPKAYEHFTIKPNFLEDKNFVSYQQTRVIPRYNSFVVELVYTINIPDETKPDNDKYMAIDVGLNNLATIVTNVGLKPVAINGKGIKSVNTRFNKEVGRIRSELKTVDKANYSLAAENLILRRNNKIDDVFHKASRYIVNYALEHDINTIIVGDAKGWKNTHEQSEHEQEQSIGTQIPFENFIHMIEYKAQTEGINVAVVDETYTSGTSFLDNEEPIAENYDNSRRVTRGLFVSNNGTEINADVNAAYQIMKKLVTSIDSSIVTEEMLHPTKINMVEYKVK

SEQ ID NO: 972 - protein, 437 aa, synthetic construct
  REGION 1..437: note = Synthetic
QYEQLASEYLIPAAPLLDEAATQAHNLYNRALYDVRQAFFKRQYINSFTDLNTLFKKRYESKENMLYHKLGYVQSAQQTLREVMTIWQAWFKALKAYRKNPARFTGRPRMPRDLHKSQRHTFYVTNQNAQIVRKDEQDKGYLVIKKLGIKIKLASADIKKIGRVAFKPVANGYKVIVPYKTKQKIKYLPDNGKYLGIDPGIDNAFACVSNTGARPLLINGRGIKSVNQYYNKKRSELKRLQAKYHQLEKLISTKQGLKPVYQETKAMKRITAWRNDKIRQFAHKASKRIVDYALSCDANTIVIGKNKSWKRSFEMGKRNNQNFIGIPHQVMIDMIKYKANLAGITVIQTNESYTSQTSALDHEQPCWNNGNKSRKKQRKSPVNRRIKRGLFKADNGTLINADINGALQIIKKVFPNFSLDDGIVGAVLRPFKWSPTI

SEQ ID NO: 973 - protein, 358 aa, synthetic construct
  REGION 1..358: note = Synthetic
VQSAQQTLKEVNTVWSAWLKALKAYQKNPAKFTGRPRIPKYLRQNQRHIFFVTNQNTKLKGNYLIISKLQVKIKLDPKIKKIQRVAFKPTYGGYRLIVQYKTNKEISYLPDNGKYIGIDPGVDNAFACAGNTGTCPLLINGRSLKSVNQYYNKERSRLKSLQAKYHQLESTVQTKQGAKPVYQETKAMQRLTAWRNAKIRQFAHKASKRIVNYALSCEANTIIIGNNKSWKRSSDMGKRSNQNFIGIPHKTMIDLIQYKANLQGITVITTNESYTSQTSALDHEKPCWENGNRSRQKQDKTLINRRIHCGLFKTNDGRLINADVNGALQIIKKAFPKFSFDKGIAGVVLRPVKWTPLI

SEQ ID NO: 974 - protein, 485 aa, synthetic construct
  REGION 1..485: note = Synthetic
HLATLVDTYYIYGNTKLENLLKWSNNCYNEANYLYRQRHFKNMRQYKYDLHLYKVGKLKEKPKYGKDYTATELTRLLKKQSLEGQNTLYRNCINIKISNSVVKDVRRNWSNYYKSLSDYKKHPYKYLGKPKFPKYLRKGKRHSTELDTQTIKLKGNYLVYDKADLKVRISPYLQQALDDTKQSNDEWLDQLTRRQRIRTYWLKPIVGGVKLCVTYVVSQKKLDKYKGKDVPQRKAGIVVAGDPGVDNLMTLATNNWQVNPLIINGKGIKSVNHFYNKRKAKLQELATKYKQKGVIIHKKDGTTQVVYHTGRAYSRLTQWRNQKILSAIHKATDRIIAYAISCGAERIIIGRNKYWKQRSNMSKKNNQNFIGIPHYRVVQILTYKANRYGIEVVSQPESYTSQTSFLDNEKPCWNNGNSSRKKQGKSPINRRIKRGLFRSNEGYLINADVNGALQIMTKNKVFCDRSNSQQIIGCVLHPRKWSPHF

SEQ ID NO: 975 - protein, 422 aa, synthetic construct
  REGION 1..422: note = Synthetic
QYEYLVEKHVIRANDSRYLILDKYAHLANNIYNQALYRFRQSLFKGKWLSYGALDKSFKQSYQQKDCMLYRSMKSVHLAQQILKLVIQNMTSWKKAVKAYQKNPGKFIGRPKLPKYRNKGGKSMVIVDNQTAKLRSNGIVEIPVINNLKIKLQHQDTTKIQQVRIISKNNQFVVEIVYKTNKVIDYKKDNERYLTIDPGLDNAFTLASNVKGFKPVIINGRPLKAINQYYNKQRAQLTKLYDLNKQSRNTKRLNNLDFYRNQKVLGFAHEASKRIVEIALSHELNTIIIGKNKGQKRSSNMGKRINQNFIGIPHQKIIEMIEYKANLAGIVVIQANEAYTSQTSFLDNEEPINQNGDKARKRKGLSPTKRRIKRGLFKSNKGFLINADVNGALQILRKVVPNAFADGIDGIGLVPVKLNLNF

SEQ ID NO: 976 - protein, 412 aa, synthetic construct
  REGION 1..412: note = Synthetic
RTEQIRIGKPHSYYKLLDRFCFASKNLYNQALYRVRQDFCAEKGYLNYNAIDASFKADNELNNSDYRNMPTAASAQQTLMLLHRNWMSFFNATKVYKANPEAFTGRPRLPKYLDKDKGRQVVVLPGQTISAKNGVVSFPKAFNGFELKFRHKDVSIRQVRFIPEANHIMAEIIYQVEEANILSDNGRYFGIDLGISNFATIASNVIPPVIINGGQLKAINQYYNKQNAQMRTVETAINPIVTPKGSTYCKQTNRLRTLAVKRNTRIKDGLHKISKHVVDLAVEHDITRIIVGKNDSWKQEVNLGKKTNQSFTQLPHAQFIVMLTYKAKAVGIEVITCEESYTSKTSHLDGEQPVKYEIYSGKRVQRGLFRTADGTTVNADVNGAAQIMRKVVPLVKAYGIEGGVNPVKVVIA

SEQ ID NO: 977 - protein, 424 aa, synthetic construct
  REGION 1..424: note = Synthetic
TEQTIVKYSDEYYKLFDELCFKAKNLYNAALYKIRQAYFEYEATMSYNSIDKVFKRKESKETEFPDDYAEMPMASSAQGTLKLVMQNWNSFWASVKEYAKHPEKFTGRPQMPKYLHKTKGRAIVYLTNQNVKVKDGVLHFPKSFCGFTVPTNVSKADIRLVQIVPKNRHFVVEVVYETQETPKKPDNSRYIGVDLGVDNFAAVVSNDGSQPVLINGKGLKSLNKRWNKRISYLREVETAMNGEWIFTSTGKAKISKQTKQQTILTNKRNNQVKDFCHKASKKIVELALERGCNTIVVGKNTDWKQESEMSKVTNQSFVQIPHAVFIDMLEYKCQRYGLNFAVTEEAHTSKTSWLDNEIPCHHDTYVGKRVKRGLFRSAKRLLINADVNGALQIVRKVFPKAGISNANSSDGVWAFGQPVRVNII

SEQ ID NO: 978 - protein, 441 aa, synthetic construct
  REGION 1..441: note = Synthetic
QRIERVKIHIGAEPYNILEEACFKSRLLYNQANYWQRQEYFNSGRDFNTILTPYDLRRQFIDSEEYKALGGHLSAETVLRLGKEWKGWKASWLKWNEEYKAQTAAQGVKYKRVADGSVKLNRKGGEPVVDKSTKSYKGEPQQPHYIKDRGLAPVYIDSGGVRQLDGAVKLPKRMGEIEIKTDHQVQSIRILPRYRCFIVELIYNIETPPVKDDNGRYFSIDLGVGNFAAVTSNVAGFQPVIVNGKGLKSINRYYNKEKSYYQGVAKQMNDKYMTHRLERLSERRNNQIEDQIHKASSYIVDLAIQNDISVITVGNNKGWKYQVNMGGQNNQNFVQLPFTKFINLLIYKARESGIRVLCVNESYTSKTSFLDGEEPCKHKEYAGQRIHRGLFVSASGKRLNADVNGSYQILKKYSPNAYALGDSGWSLQPKVVDMVKYIGLN

SEQ ID NO: 979 - protein, 415 aa, synthetic construct
  REGION 1..415: note = Synthetic
RTERTIISETHPHYKLLKDFCHESKNLYNYGNYILRQKWNEKDWDWFSKYGLRDYLRKNQETEGNPWNRQSTSHAAAETILSLTNAWKAYFSSVKSYNKTPEKFKARPKPPSYLPKNGHYIITLDTTNAKVKDGFVKFPKTYNGLTIPFTKADKIQCVRIVPHWNNITIEVVYLLDVPEAKPDNGRYLSIDIGIDNFATITSNIVGFQSLVLNGKGLKSINQYYNKQKAYYQSIADSQGQRKQTDRLQRLTEKRNRQINDFMHKASNYVAELAQQGDVSHVVIGYNAGWKNEVNIGRINNQKFVNIPHLSFINKLRYKLENIGIELVVTEESYTSKSSFLSGEFPDKKPQYSGERKYRGLYIDKSGIKINADCNGSYQILKKVFPDAYSNGIVGVSLHPVKVSVSDVRKGRKALA

SEQ ID NO: 980 - protein, 444 aa, synthetic construct
  REGION 1..444: note = Synthetic
ETMVLTEEHRIKKCGNRKLYHEIDMYCYRAKNLSNTVQYLISQCYRIHRKLKDGEILDSWEKSLIYRINCAIWKYNIGRKGKKLKYIDEQNGFIADAYFLSWHMKTLDVYKDMPYATCSQICIQEKCREWKSFHHALSAYRKAPHGFMGCPHKPGYLDPTTGRGRLVITSQNFSVDRDGYIRMPKFLEGIQLHARHSGIHQIRIRTEKTEILIQIMYEQREQPLIKGGNVMGIDLGVGNLVTISMDSEAHPIIINGRPLKSINRYYNKKKTLLQKQAKKSNHRNTTNRIERLTQKRNRKIKDYLHKTSRKVIETALQTKTRLIVIGNNRGWKQHVALGNRTNQTFVSIPYKVLIDMICYKAQLVGIDVRVVNESYTSGTSYLDGENPEKQCYDNSRRVSRGMFRSNKGKLINADVNAAYQIIKAAGIKNLAVKENETVTRVNVA

SEQ ID NO: 981 - protein, 307 aa, synthetic construct
  REGION 1..307: note = Synthetic
MVEYGKNPKKFKGHPHVPGYLNPKKGRGSLVITSQNFKVDEDGNVTMPKFLSGIHIRARHRNIRQIRIKMFKDSILISLMYEKEEKQISGTKVMGIDLGVNNLIAAAWDSEDRPVLINGKPIKSINQYYNKARAHMQKEAKVYNGKNRTRRIDKLTAKRNRKIKDYMHKASRKLVNLAVSSNVGLIVIGANQGWKQKVHMGNVTNQNFVSIPYKTLINMIEYKARLEGIEVKTVRESYTSGTSYLDGEKPAREYYDKARRVKRGLFKSNSGIFINADVNAAYQMMKLGDTRAIPIKTGEQIIKIKAA

SEQ ID NO: 982 - protein, 464 aa, synthetic construct
  REGION 1..464: note = Synthetic
TEEHFIKHSKRTSSFYELVDGACCKSKNVYNSTNYLIRQVLHIQTKLYEGEFLDKYQSKLIFETNKLVDSYNHSLNHTLKYINSESGFTIINYNFLAWLQKSTPEFKDLGSPKSQQCIKNLCANWKAYFKALKAYKEHPELFTGYPQKPSYYEKNERHWIVLTKQFFKQEGSVITISQFPDLVIYSNRDVSSIALKTVDNGIRIRLSYKQEAKSPKPDNQRVYSIDLGVNNLATITSNTEQNPFIINGRIVKSINQYYNKRLSELKSLAKITNKRDTTKRIRRLSTKRDNLIKNYMHQASRYLINQALKNEINTIIIGNNTGWKQECNMGSVNNQNFVQIPFNKFKSMISYKAELEGIKVIVTEESYTSGTSYLDNEAPIKEKYNKKRRVHRGLFKSASGELINADVNGSYQIMKKVLDSVPIKHKEQILVINPLKNLPYKEVEIIGSSHDRNRSKVLNTSIVI

SEQ ID NO: 983 - protein, 751 aa, synthetic construct
  REGION 1..751: note = Synthetic
NYAIYNERYTITKDHQLYELFVACSIQSNELYNYMNRIERARFLDKHTVYFHQDLKTYIYDRLSWRSNTNSLYHGLLKDEDFKMMRSFDRMPACLRLGTVYDAADRWYKFMNEEYQMLDYYNKHGDTISDDLFRSMLPKLPRTKLGINRRRSFTIDPNKIRVVRNPKYIEKYKRANYKNGSRNTIENYTSLIKLPADMLNALDNTTIHKSIKELNQLSKHYNLTIPTMQGQKSKIVEIRVTPNRGIFNIDIKYRIQQMKRPTSNSYDSYGFDTSRIAGIDFGLDNLMAVANNVGAAPLLIKGKSLVAMNTYYNEKIYHLMYECGLNSHRLTNQISRLDNRRMNKMHNMMNNAVIKLVSYLDLLQCKTLVLGINDSLFNGFLKEGELVNKRPLDFNYLIRRIYNACKKSNINVVTVDEYYTSITSILDNQLPVKENKEAYRRVTNRLYMTQNFGLINADVNSAMQIICKYKKDAFHKVFKKCGIDMIYNNNMSGAPIIHKHSSYHTHIVRDPSAGEYEIVRQFYRPKTEYDDPAGSASYYKAIPHSMLKDLPINYYRWVIGSHNEWRMSKVPYHYSMMEQWLDLDVQYSTILFSRSHLNISRYLYCQVMFDEYRIRCGKMPRFYHHKKKHVTIDGEKYKSTGRALEIQKLLDDMYPKYNIKQTAAPMLKGLPGAGMLQPVSVEISDAKTLCILDNRRRICLPCSYIEASSSHSYQLTSVNKMICSANYNRGIDKNTFKMFDPYVDKKRLSKG

SEQ ID NO: 984 - protein, 414 aa, synthetic construct
  REGION 1..414: note = Synthetic
KLTERQIVTKSDPRFEQLDDLCFRAKNLYNKSLYLTRHSLFNENFQFASNFESILRDDTEYRDYRNMLDMASAQQVLRQVSSTWKAYFAAHKNWKQNPDKYPGEPKIPKYLKKDGRYPFTITTGPNGRDYSAYLLPDGSFKLPKKFNGLKIYTACFHKEGFQRVNEIKIISKKYQIEIFIAYTVEVPDTKPDNSRYLSIDLGLDNLAACVTNDQSLHPFVINGKSLKSINQYYNKKQSELRSEAKIRHNLDWTHRLDRLTEKRRRKIEDYLHCASKYLIEYCVQNDINTIIIGKNDSWKGSINLGSRTNQNFVYIPHTRFIDMVKYKGQVNGIDTICTEESYTSGTSFLDGEEPNKDYYNKSRRVHRGLFKSNEGLLINADINGAYQIMKKVVPNAFEQWDRGHVVSPLRISFS

SEQ ID NO: 985 - protein, 408 aa, synthetic construct
  REGION 1..408: note = Synthetic
CVSRRVESHQIDKNHWLYEYADELCYKSKNLYNAVQYRIKVKKHKDKEDFKFSGSYLYKRYKELDEAKDLNSNVKIRTLDKLATDWTNFFKALKKNGKNGTEKRKIKEPGFKKSGPKGRCKAEWQVNLNKDSTFSFPSTKGKLRFEPQNKDNVICASFDPLTEDGRYYNLNIIRKVVEPQLQDVDDCSRIVGIDLGIDNLATVVNNFGLRPFAINGKPLKSMNRYFYKKRAKYMQYIGGKGKSNRIYKLTRKRNNKVKTYIHKTSRKITDWCVEHNVDAVVIGKNKQWKNEINIGKVNNQKFVSIPYNMLIDQLKYKLKDEGIKVIITEEANTSEGSFLDRDPLPKYDKDNKPKRSGRRVERGLYEASDGTKINADVNAGYNIIRKVFPKTFNGIEGVPLHPVRINLD

SEQ ID NO: 986 - protein, 412 aa, synthetic construct
  REGION 1..412: note = Synthetic
LKVRVETHQITKSHKLYEFCDRKCYESKNLYNEVNYILRQRFTNQKEFNKNKFTSNYYDLIKEFKNCDASEHLTNQFYEPILKLLGEDWKSFFKTIKDWKENKNKYKGRPNLPGYAPTGETGRKIAINRKIYRRKDGKFKFAGEPVDFKPQTENKLKQARIVPKPNGKNVEYYNLEIVYDKEVPETNEKRENIAGIDFGQDRLASVVNNIGEKPFAINGKPINSINAYFNKKRAKYMSYVDNRGTSNKIKKLTRKRNNKIKYFFHNVSKYIVDWCDENDIDTLVIGKNKNWKNESNMGKKNNQNWISIPHNMLVEQIEYKCEDIGIEVLRQEESYTSKASFLDKDKIPVYKSGEKNAYEFSGKRIKRGLYKASDGTIIHADLNGAYNIVRKKLGNVFNKKIYLHPEIININN

SEQ ID NO: 987 - protein, 471 aa, synthetic construct
  REGION 1..471: note = Synthetic
TQQMRVTKIDIHKKNDIFSKIDNYCWLSKNLYNRCNYLIRQLYIITRKIRNKEDVTEEQKKFVDNIHKWVDDYNMKVKNGQTKGKKKMKLSQKWYGEYFEKETLNKYILDEIDYKALQSQSAQSVLGRVHNTWISYFNSLTDYYKNPNKYKSKPKMPNYKNTKNGRYMFILTNLQVKIINNILFFTQKDLKKYTFRVPLENYKRGHTKDCDLREVRFIPNNDIYTMEIVHKINDKPQLKEKKGRIIGIDIGVDRLATVCNSIGVKPFAINGKPLKSINKLWNKQISAYKSKLKKVNNKYSSKKYLKMCRDRNNKMNTYIHQSASYIIKWCVKHNIDTIVIGKNDGWKQKCNVGKETQTFVQIPFASFIEKIKYRAEALGIEVILQEESYTSKSSFIDEDYIPVFKKDDNNANFSGSRKLRGLYITKDGIKIHADLNGAYNILRKYDNSFTYNNDYLHPYIVMPNKYNLQYK

SEQ ID NO: 988 - protein, 412 aa, synthetic construct
  REGION 1..412: note = Synthetic
MNVNRVERHIINKNHKMYSVVNEYCFKSKNLYNFANYTIRQLFIKEQTYIDDRKLSKVIKHEDCFKDIGSNSGQQTLKLLHQNWKSFFAALKAYQKNPSSFLGKPQIPKYLKKDGRYVWVLTNIQSKIINGYLNFSFKPLHPFNGLVKTRIKEKHIQTRFIPKEDHYILEIVYQKEIPLQIETESKRMIGIDLGISRFATVQNNIGLKPFAINGGHIKSYNNFYNKLASKYRQKAKKVNKLDWTNTLQRLTTKRNNKMDYYMHCASKYIVDYCINNQIDTVVIGYNEKWKQNSKMSKINNQNFTSVPFSSFVSKLEYKLNDIGIKVIKTEESYTSKASFLDNDLMIKDNKFSGKRIKRGLYRSKNNTIINADINGASNIIKKVFPNAFANGIEGLDLHPSIVNIFLANGKRE

SEQ ID NO: 989 - protein, 406 aa, synthetic construct
  REGION 1..406: note = Synthetic
IKTQRVERHIIDKNHKAWKLFDEYCFKAKNIYNLANYTQRQLFVRGSPILQYVELSKELNKTEAFKDIGSNSAQMTLRLLCKDWKSFLVSVKDYWKHPNKYLGKPKLPRYKKKNGRHIFIMTNMQTHLYDGYLYFAFIPLKGLNNLFKTNVKNKLLQTRIIPKGSTYILEIVYEIEVQEPKEFNNRILGIDLGVDNLATCVNNVGVQPIIINGKVIKSINQYYNKKKAKLQSDLKKRHKKDWSNKLDKLQQDRDNKINYYLHNASKSIVTYAEGLNITIIVIGLNKTWKQESGLFKSANQNFISIPYDKLIKMITYKCSNIGIKVITNNESYTSGCSFLDNEVIGKDTYNKSRRVVRGLFKSNTNKLINSDVNGAYNIIKKVFSEAFKVDEIEGVHLHPIRVSMTC

SEQ ID NO: 990 - protein, 408 aa, synthetic construct
  REGION 1..408: note = Synthetic
IKVNRVEQTIIKPSHKMYSVINDFSIKSRTMYNYANWFCRQCFIRENHWLRYYEMQIIFKNDKCYKNLMSQSSQCVLQVLDRNWKSYFNGVKQWKKNPEKFLGMPKLPKYIKSKGWIWLLKNNNTYIKEGRLYFRLKAMQGYSFKTEIPKDSRLISVRFVPKNGNFVLEIVYEIELPYISEFNNNYVSIDLGINNFITVSNNIGQRPTIIKGGFVKSENQWYNKRRADKYSKLTDAYWSKYLDRITVIRYNRIKNYMHHVSKYVIDFCKANKIDNVIVGLNETWKQEVNMGNRVNQNFVFIPYDMFIKQLQYKCQDNGMRLITHEESYTSGTSALDNELPIKENYNKKRRIKRGLFRSNEGILINSDVNGSIQIAKKVNPNIFQEYGLEGCLNPITIKDIFSCYKQSA

SEQ ID NO: 991 - protein, 405 aa, synthetic construct
  REGION 1..405: note = Synthetic
NNLNKDLPIPSYHAMIDHDSKEEFGLKIGIIDADLLSNNSHRFPNLALMKISAYHKYRRSDKVTLLMNYNDIEKYDMVYLSKVFDYTEIPIDIMKYDNLYYGGTGFHYDLMPDLPDFMEHMKPDYILYHSWIGDMMREGAKRKEFEYYLDYSIGFMTRGCFRKCEFCVNKKYDKVQLHSPVKEFLDEDKPYICLLDDNLFGYPKWKDIIEELVTTKKIQSELQLRHKQHWSNKLNTITLKRGNKIKNIIHHTSHYIIDYCNKNKINTLVVGLNKTWKQNCKLNGSATQNFVFIPYDMLIKQLEYKCQDVGVRLIMTEESYTSGTSFLDNETPKKQNYNKSRRVHRGLFKSNNGQLINSDVNGAYQIMKKVFPNAYADGIKGCLTPVIINVVKTTRDIKNGKENFR

SEQ ID NO: 992 - protein, 425 aa, synthetic construct
  REGION 1..425: note = Synthetic
IMCNRTEIHIIKKSDDLFKIIDDLCWRSKNLYNYANYMVRQEFINTSKEKEQGLRKHAVWIKYQQLCKDCKTADCYKAMKASSSQKTLKLLDKDWKSFFEAIKIWKTNPEKFTGRPKLPGYKNKEHGRANYIITNQCCRIIDGYLFFSSRDKSMEPFNHRFKTHIPENAKLMQVRFHPNKDAFPSQYDIEVVYETECPEPKKDTDIVAAIDIGVDNFMTVVTNQKDIVPIVINGRKAKAMNQEYNKLISEEKSRIKLRHNLDWSNECQRLTDRRAMRLEDFYHKATTAVAEFCLKNNVSYVVCGHNLLWKQNCDMGKVNNQNFVYLGHTETIKKLTYKMEDRGIRFQEFEESYTSGTSFLDDESPNLENYNKNRRVHRGLFQSNNGEYINADVNGAYQIMKKVFPDMFANGTDGYPRHPRIINVI

SEQ ID NO: 993 - protein, 284 aa, synthetic construct
  REGION 1..284: note = Synthetic
MDIYFFSSRDKSMEPFNHRFKTHIPENAKLMQVRFHPNKDAFPSQYDIEVVYETECPEPKKDTDIVAAIDIGVDNFMTVVTNQKDIVPIVINGRKAKAMNQEYNKLISEEKSRIKLRHNLDWSNECQRLTDRRAMRLEDFYHKATTAVAEFCLKNNVSYVVCGHNLLWKQNCDMGKVNNQNFVYLGHTETIKKLTYKMEDRGIRFQEFEESYTSGTSFLDDESPNLENYNKNRRVHRGLFQSNNGEYINADVNGAYQIMKKVFPDMFANGTDGYPRHPRIINVI

SEQ ID NO: 994 - protein, 420 aa, synthetic construct
  REGION 1..420: note = Synthetic
VKVQRAEKHRIKKNNKFYLLIDDFCWKSKNMYNYGNYIIRQEFISTSKLKEEGFAEHANWIQYNALYQICKSSDSYVALGSIAAQATLRKLEKNWKSFFESIKDYQIHPEKYQGRPKIPKYLDKEKGRYELGINNQRCKIKDGYVYFGWKPLRCLNGIFKSKIPDDAKLIQCRFVPKKDEYVLEVVYEISLLNINKKKSQNIAAIDLGVDNLITLTTNCGTQPIVINGKPLKAINQYYNKVISDMRSDLKLRNDMNWSHKMQKITTKRNYKVEDYIHKATKIVIDFLKDNDIDTLVCGYNTGWKQETNIGKINNQNFVYIPHSSIIEKLSYKCENEGILFKTTEEGYTSGTSFLDEEDPCEENYDKSRRKYRGLFISNNGIPINADVNGSYQIMKKVFPNAFKNGVENAILHPIVVNIPA

SEQ ID NO: 995 - protein, 403 aa, synthetic construct
  REGION 1..403: note = Synthetic
IKRKRTEQHNIKYGSDFYKFIDEYCFKSKNLYNYANYIVRQEFINNNKWIHYNELFQLVKESDPYKDIGSNTGQGTLRILDKMWKSFFVAIKDWTKYPSKYLGRPKIPKYKAKDGRFVLSLDSNKVKLKNGYVYFAWKPFKKFNNLFRTKAKDRILQCRFIPKCRKYVMEIVYEIEVPDILEPSDRVAAIDIGVDNFITMVNNIGENPIAVKGGVIKSINQFYNKRKATIQSELKKANGKDWSKKLQKLTDKRYEMIKYQMHCISKYAVDWCVLYGIDTLIVGHNNNWKQENKGMQNFTYIPYELFIQMLAYKCEDNGIKFIENEEAYTSGTSFLDNEDPVKENYKKERRVYRGLFVSNDGKKINADVNGAYQIIKKVIPDAFSKGIEGVGLHPTIISLECAR

SEQ ID NO: 996 - protein, 294 aa, synthetic construct
  REGION 1..294: note = Synthetic
VIITNVQFKILDGYIRFSWQPLKSLNKMFKTNIKDKLMQIRFIPKGIDYIMEIVYEINLPETNQYNQRIAGIDIGVNNLATVSNNICLKSFIINGKPLKSMNQYYNKKKAKFQSDLKTKHNKNWSNKLDKLTMKRNNKIKDYIHKSSKYIVNWCMENNINTVIIGYNSKWKQNSDLSKKVNQNFVQIPYKIFINQLKYKCQNNAINFILTEESYTSGTSFLDSEEPVKKNYDKSRRKYRGLFISNKGIKINADLNGSYQIIKKAMPNAFSNGIEGVCLHPIRVNFNSNKSNRNI

SEQ ID NO: 997 - protein, 454 aa, synthetic construct
  REGION 1..454: note = Synthetic
EITRTERHIIKRNHILYSKFGEITFASKNLYNLSNYYMRQVFIICDKIKNNIPVNNEQTKFLEEINKKVNDYNKFKENNSKNKSKEIKKLNFFDADNKSKSIKYDFLNFLMKNTPEYKDLYAQISQQCLKLLEKNWKSFFSSIKDWKKNPAKYSGKPKLPKYLKKNGKNIVILTNQLVEYHDNELFFPPRIGNFKFKTRINGKFQQVRVLPRNNLFVIEIVYRKQVPEFKKNNGKYVGVDLGVNNLAALTNSENILPVLISGKKAKSINQYYNKKLSFYRKVVKQMNNKEWSNKMGKITLKRNSIMKDCFHKASKSIVDYALSCGANTVVIGYNQGWKTNVNMGKKVNQAFVGLPHKTLVEQIRYKCEEHGINVELPDERYTSGTSFLDNEKPVKELYDKKRRVRRGLFKSNAGKFINADINASLQIIKKVSPDAFNKGHGVEDCGFNPVKVVL

SEQ ID NO: 998 - protein, 467 aa, synthetic construct
  REGION 1..467: note = Synthetic
SGIRRVEQQVITTSSPLYALVDDYCFRAKNVYNATNYICRQQFFSAKTFPDKGTLLKLVPLEPCYDEFKGLARTFQEIVNLVFLSWKSYEKLEDKYRKDPASLKGEPRIPRYKHKVNGRAPISFTYQQLKESCGYISFPQEFCLDGKPVKIKSCSKGALMQVRIIPKTGYYVLEIIRLLPLPKKKSDNGRYLGIDPGVDNVCAVASNCGLKPLLVSGRALKTINQMYNKLIAEYRAKWDKLNKDSLNRQLMEKGLPYKKSSKRIDALQRNRVRRIDSILHKISRLIADYAEQNNICKIVIGKNVDWKQGTHMGKVSNQNFVCIPIARLIEMIKYKAEEYGIEVITIDEKHTSGTSFWDGEEPVKEFYNKSRRVTRGLFKANDGTLINADINAACQIIRKALPNAFAKHTLRVNGSLGTMCNAGGSVEGICGNPVSLRHYGTYESVKKALLSPVRLEAGETSGAYNLP

SEQ ID NO: 999 - protein, 543 aa, synthetic construct
  REGION 1..543: note = Synthetic
QFRGYRTRTLKTYKINNSEYEKVDQLCLVAKNIYNSVLYICKQDFFYRIEHRIPYSKGTYSPTAKKSTLYNKAENKVYQSESIKSLLLNIYEKDCRALPSIVVDSIVNKACQTFQAFIAAQLDYKKNPQKYTGKPKLPHYFKETNKKGSRFTCILPSTFNYVFYKDHQIFINYTYNKKLIANGRVKNAPLTLNPVKTNLDLSYGLYSTSKLDYNPLIQLQIVPKKFSKSHYNYELQLVYDLPTKIQVDSSFKNIGAIDLGIDNFAAFTVYSTQSSVRPLIINGKGLKSKNKFYNKEISYLKSIGAINNSNSNKFTFNKIRGIYAKRDRVFKDFYHKASRAIVDYALENKVSIIFIGYNKNWKSSSSLTKNPNQTFQQISYEKFKQYLSYKAESVGIKVREVNEAYSSGTSYLDNELPVTENYNKERRIYRGLFTTNTNKIINADINASYQIMVAGCKQYFKKYHCLYDPAIITKESLSPKVINIDTFKVNQHKTKIQNKQHFNAPVSQYRTDKQAAKVYNLAQQYEQLRISEQNKTYTEVLCI

SEQ ID NO: 1000 - protein, 447 aa, synthetic construct
  REGION 1..447: note = Synthetic
YVTRTQTLLVVKQNNTLFKTIDDLSFKAKNIYNSALYLCRQSFFEYKQSIGYAALNSFHKSLYEADYKSLPTKTTQQIIQVVSKNMKAFINASKDFNKNPQKYKAKPKLPNYKNPSKGRFNLYFTNQQVKFKDGYIHFPSSTNIPPLKTHLNLSLPKDNDLYISDSVESPIRQVRIIPLLNSYRIELVYTKEIQLPEYTDSTEPHNIASIDLGINNFAAIVTYGPKPSRPLILNGKGLKSYNKNFNKKLAHLKSSSMLSNKKHTTKAIQMLISKRNRVYNDFYHKASRVIVKYLLDNKVSILVIGYNQGWKQNSSLSKNVNQTFIQIGFSIFIKMLTYKAKEQGIQVILQQEAYSSGTSFLDKEPVTKEFYNKTRRIKRGLFKHNNQTDFKYTYINADINSAFQILSKATNNKLTYDSKFITQQSITPRVINIDTFQRTKLNQKKAS

SEQ ID NO: 1001 - protein, 436 aa, synthetic construct
  REGION 1..436: note = Synthetic
LFPLIDDYAFKSKNLYNYANYIIRQVFLITTRLSKDKQISIEQQQYLEEINVKVDEYNNKKQELAEQKNKKFKPLAYFGKEHKTVGYDFLEFICAKALDYKALMAQVAQQTLIVLSQNWKSFFTSIQDWSKNKDKYTGMPSLPQYKPKTTGRFNIYFTNQNCSILDNCIKFPKCFGGYKLPTKVKNGLQQVRIVPKNQVYIIEIVYSIKCVEERLDNGKYISIDIGLDNFATIVSNTGMKPVIISGKGLKSENKYYNKLKAHYQSVSKQMNKVNNTNKLDKITLKRNNKVENLIHKASRRVIDIALENDISVIVIGNNKDWKRESEMGSNVNQSFVEIPHQRFIEMVEYKAQNNGIKVILTEESYTSGTSFIDNEMPTTENYNKSRRIKRGLFKSNKGTLINADVNAAYQIMKKVFPNVYTDGIEGIGLCPVRVVI

SEQ ID NO: 1002 - protein, 398 aa, synthetic construct
  REGION 1..398: note = Synthetic
KIMQLVQQVQLKRSRLLDNITFLSKNLYNLATYEVRQRFFKDRHWIRYIELWNTLKSHGAYQELQKTCGSHPPQQVLKQVDKNFKSFFNAMKQWKREPSKFRGMPKLPHYKHKNGRNLLYFTSLQCRLRDGVILLTQKMEKLGFPKINTYLKNVKGVRIVPFGDRYNIELIYDYNPRDLHLNEKNVMGIDLGLTNIVTSSDNIGNNPLIIKGGVVKSINQFYNKQLAKYKSSSKKCNNTDATSRILRLHRKRNNKIRDFFHKASRTIINNCISNDIGTIIIGYNEGWKQKIKIGKKNNQNFVSIPFQKLVHQIEYKSEMVGIKVVRITEEYTSQVCSSCGVVRKSNRKYRGLYVCKECEMVLNADVNASRNIMCKGVPESLRIGDRGCLNHPVVLKVY

SEQ ID NO: 1003 - protein, 428 aa, synthetic construct
  REGION 1..428: note = Synthetic
TKKHSHPQLAIRMQMKPRPIFTDLCTCAKNLYNRATYEVRQEFFKTGKWIQYISLYHRLKHEPVYLALKDISDSYLPQQVLRQVEQIWRSFFNGLKAWKTDPTKFQARPREPRYKPKNGLHMLNFPRPQVRIREKQILFARNLMVRGFPTFSLGTLPLTAETCVGARLVPYYDRFVVELLYEVQVHPFPTTDSSSPRAMGIDLGLNNLVTTSDGLLVKGGVVKTINQWYNKQLAHYRSIAATHNQQFSTHRIQSLQRGRMNRLQNFFHQTSRRIITYCLQHNIDTLVIGYNARWKQHCNLGKRTNQSFVQIPFLKFVQMLEYKAKLVGMTVVRVNEAYTSQQCSQCGYVDKRNRKSRGCFCCRKCGHHLNADYNAARNILQRYINRSQVIPTVSSPSSVAHLPDSGCVTHPVQNYLLNSCLTNQVITP

SEQ ID NO: 1004 - protein, 404 aa, synthetic construct
  REGION 1..404: note = Synthetic
SITIQLKATPLLADLTIRAKNLYNVATYQMRQRFFQRKRLYTYTALWKELKEHKAYLALKELAGAQSPQQILRLVRSTWTGYLAAKRAYRLHPANFHAPPKPPKYVKKHRKFVVLWSHQEVRIRNGKLLLPRKVMTKGFPAIPLDRLPCTAQTYRTALLVPFYDRYQFIITYEAAATAPAIEKDAPEKVLGVDLGVNNLVATSDGLLIKGKIIKSINHYYNKQRAKLCSVLARHKLPTSRRLQRLLRLRQTKIHDYLHKASRQLIQHCREQQITTIVIGRNKHWKQKVRLGKKTNQHFVGIPFHKFIRMLTYKAAAAGINVQLVSEAYTSQTCSRCGHRSRSNRVFRGLFLCNHCALVCNADVNAAINIAQKVRSRAAATTGSTPRRGARGTVPVPVPSDTNLS

SEQ ID NO: 1005 - protein, 481 aa, synthetic construct
  REGION 1..481: note = Synthetic
NKIFISERIQVKPSPELSKVCHLAKNLYNLANFLVRARFFFKQDNDRALDTDWLKELEHELFSRPARFDSIAAITQKYIKIRNQHIAKKSSENGRQGYGNKLARINYTELWRLVQYTEAYKKMNSHSAQGTLQQVISDWDSFYEAVDEYNDDKKILTPKAFNDKWKSPPSIPRYKKKNGETVAFFSNQHCRIRDGYLTFPGLTNSRYSKKWLSPVKTRIRGKFQTVRVVPRGTMYVIEIVYAKEVQDLGLNKDNVCSIDIGVRNIVTMVNNMGIKPIAVKGGVVKSINQFYNKKRAKLMYIKDKQQYSHWTKRLKKLETKRNNILNNYFHQLSKHLVDFWIENNIGSVVIGYNQQWKQEVNMGKRNNQNFVYIPFWLLIRKIMYKAYLVGITVYLVREPYTSSCSFLDGEEIGFHEYYKGVRKGGLFRASNGRVINADVNAAYNIMIKAIKDAITADEIEDAALHPRRVDWHLLPMTGRNC

SEQ ID NO: 1006 - protein, 419 aa, synthetic construct
  REGION 1..419: note = Synthetic
MMQLTEQIQLKTAPELSHLCHLAKNLYNEANFEFRQFFFNLGEFVNYYDLQVMLKNTACYKALPAQTSQQILDLVVKNWKGYFAAVKEYKINPAKFLGCSKPPHYKEKKGESIAIFTNQNTRLKDGYICFPKKCHLPPIKTRLVQYQQVRILPQGIGYIIEIIYNAPEMDLGLNRDNVIGIDLGLNNLATIVNNIGKQPIVVKGGIVKSINQFCNKINSKLQSIKDKQGYKFQTQNQLRILKKRNNQIQDVFHKTSRWIIQYCIQNDIGTIVFGYNPEWKQEINIGHKNNQNFVQVPFAKLIQMIEYKAKLVGLQSIQQEESYTSKCSFVDNESIEKHTSYSGTRLRSISIHGKKVRCNLFRRANGQYLNGDVNGAYNILRKAVPNAFAEERAGLALVPHSLAMQSTFASRMKHILAVC

SEQ ID NO: 1007 - protein, 488 aa, synthetic construct
  REGION 1..488: note = Synthetic
NTMLLTERVQVKTTTQLHALFQLSKNLYNKANCLVHAGFQRHVLWNAPAVQKAGCRVYYPEMDRELQGSGEYRALPAKTSQKILQQVDTAWTSYFEAIKAWKKDCLLPKTQRKFRSKPHKPGWKGEECENLLFFTNQQCKIKENYLHFPKAVGIPPVKVNATRIGPLQQVRILPRGYYSIVEIVFKKSYRGAERVAQTKNNLPQRIVAIDLGVRNLVCLVTNIPGVRPVVVKGGVVKSINQYYNKQRAHYQQQYEHLGIRGTPRRLARLTRKRNNKIEDIFHKLSQDIIEYCQALRVGTIIMGYNPRWKQNCSMGKRNNQNFVTIPFHSLVQKITYKAKLAGIKVEQVEESHTSKCSFLDDEPIAHHDTYLGQRGVYRSKKEGGNGKISYGLFKTAKGQIVNADVNGGYNILRKAFPEFTKDGIEGLGLIPVAVKFSKKDQDFTGLKQLANLASPLHALPKAGAVDGTEVGGVSTGGGSSKSIKIYTK

SEQ ID NO: 1008 - protein, 422 aa, synthetic construct
  REGION 1..422: note = Synthetic
VPRTESIWLGPDKGLGYLCHLSKNLFNEANYIVRQEKFATGRWVRYYELWTALKNSPNYMGLPAQTAQQTLWTVDACWYAYYMAMKDYMVNPEKYLAIPRFPKYKKKDGEFILVFSNQQVRLKNGMFKLPKAIGLEVRTRLPNGTKITGARIIPRGIGYMLEITYDKEVKEKRVQEKESPIEGEIENDPKEQAKPCRALGIDPGLNNLLATVNNIGVPPIVFKGGPVKSMNQFYNKRRAALQSQYARQGIETGPKMQKLSLKRNRKINCFFHLVSYLVILYCKMWDIDTIVLGRNKLWKQEIDLGKTTNQNFMNIPFYKLYQMIKYKAEEAGIRVIEIDEAYTSMCSFLDWESIEKHEVYMGKRIKRGLFKSAKGKLINADLNGAYNHMRNAIPESMEKLKEMVMADGIEAVGIHPVRAVLY

SEQ ID NO: 1009 - protein, 407 aa, synthetic construct
  REGION 1..407: note = Synthetic
VRVIRTERIWLKSNPILGHLCHISKNLFNETNYLVRQSYFTSGKRIKGIDLRNNLQDSLNFRSLPQVTALKIIAVVEEAWKSFFAAVADWKRHPEKYFKQPRPPRYKDKAGEFLLWYSKAQIKSIADLLVIPQASNLTLKPRIASYQTMLGIRIIPQGVGYIAEILYAKYVPAIPKGKPTRVVGIDLGLTNLITMVNNIGKEPIAVKGGVVKSINQYYNKERVHLHSIYSRQEIGNGDKLRKLTAKRKRKLRNHFHEVSSSVTRWCQQHSIDAVVIGHNKLWKQHINLGKRVNQNFVSIPFDWFLNQLKYKLNDVGIRVICVNESYTSKCSFLDVESISQKPTYKGERITRGLYLSSQGRIINSDVNGGYNILKKAVPNAFSMNETVDGIEGVWLHPVRLKQTLATS

SEQ ID NO: 1010 - protein, 373 aa, synthetic construct
  REGION 1..373: note = Synthetic
SFVLRTESILLPKGETKHLTSKCNISRIVYNSANHHFRPIYQETGKGPNRSSVWNWLKNHHDFPLWKDAIGTKTCQQIVNLLVHNYSSYFKALKAWKVDSSKFLSKPKSPGFINKTICAKRLFILPIAAQSLRVNHELGILKLPKRFDLTVRFNQSKGKEVRNGRIIPIADNRFVFQISYRDKAVPISVKNSRIASIDLGVNNLVTLSTNFGSQPFKINGGPVKSINQYFNKEKARLDRIYAITNAKGSSKRDKLIEKRNRKLSDFFHKSSRSIINYCISQKIDTIVIGLNDFWKQNVKMRKKDKQNFVYLPFRKLIDQIMYKAADSGIQVIVNEENYTSKCSFLDNEFPQKYSSYLGKRVKRGKFRANDGTY

SEQ ID NO: 1011 - protein, 506 aa, synthetic construct
  REGION 1..506: note = Synthetic
IPVKRTQRIHHQYEDSISYICHLSKNLWNQAHHLVYGYYKKFGHVPSYEEVDSVLNKKSYYKKDGKYCEEYDNYHKLGGATAQQILKVYIKEWISYLKGKKGYFVNPNKYTGKPKEPGYKKKDGEFILIFTNEQIKFKERKDGSIWMTFPKKIDNKPSRLKDLKILLGKVNDLDSYLLERLMWNKFDIVRIIPKGTGYWIEIVYDQEVLKNASDIYKLDEDIIMSIDLGVENLVAITDTIGNRPIIIKTEILKANNQWYNKRRSELQAIYDRQKIGCLMKRDNNNKDEKIRYLVNKTGGKMDIITENRNNSVMDDLHKVSRFLINHALSIKSKTIAFVRNVGWKQKVKMGRRNNQNFVQIPHKKLIDMTRYKGDECGIDVVDDTEEYTSKCSFPDSEDICFHKEYKGKRIYRGLFEASKGFRINADVNGSYNFLRKIAERTIKNKIKFDYVYPKFNVFDIMEGVVVQGLVPKRLSLRFDDKKLSQFGNELLVERPIILTISNVNIF

SEQ ID NO: 1012 - protein, 412 aa, synthetic construct
  REGION 1..412: note = Synthetic
VLMKRTEIIYIPPNPTLHYYCHLSKNLYNQATYLIKQSLKENKLLSYYDLNNMLKDSENYKELPTQSAQQILKIVSRNWKSYFKALKEYTNNPNKFKAKPKPPSFKPKDGLFMLVFTNQQCKIKDGKLKSDKTKGFITQTVVRFPKKINLIIPTRLPDNTNIREVRLIPTLEGYKIEIIYEKKPIITELNDNKIISIDLGMKNIITMTNNFGDKPIIIRDNGKGIKSTNQYFNKIVSKLKSIYNKQNIKIGRKLKKVIIKRNFKVNDWIHKASRFIVDYCVKNKVSKIIIGYNDDWKQEVSLGKKNNQTFTLIPFKMLIDKIVYKAEEYGIKVILTEESYTSKCSFFDDEEIGKKKEYAGKRFCRGLFKTLKGWVVNADVNGAYNIMRKVVDNAFKGIDLCKLPTHPVKVYI

SEQ ID NO: 1013 - protein, 403 aa, synthetic construct
  REGION 1..403: note = Synthetic
IECLRTERIEVGFDPNLSQLCHQTKNLYNAANYTIRQFFFKQKTILTYYKLWKIFKTTPEYKQLPGHTAQQTLRILARNWTSFIRTNREFTHNPKKYMSKPSIPRFKKKDGEFQALFTINQVNIDRDGYLNFPKKVKYKIKTRLSDKTKLQLVRVIPKGVGYRIEIVYKRNFQTRVPSMKRKAAIDLGVVNIITMIDNIGSRPIVVKDDGKGLKSNIQFYLKERARLQSIYKSQSIKSGKKLTKLIDTFERKKLEQLHKISIAIVQECENKNIGVLVIGYNPEWKQRVQLGRRMNQNFVSIPYFELIEKIKYKSEEKSIQVELVDERYTSKCSFLDNEMVKKQLQYQGKRVSRGIFCSSKGYKINADVNAAYNILAKSDPKALPKRSVDGVGGYVAYPSSWKL

SEQ ID NO: 1014 - protein, 434 aa, synthetic construct
  REGION 1..434: note = Synthetic
TKVLRVDCIELPFNPILSKLCHQIKNLYNRANYLVKQALNNREKLLQYYDLNTLLKEEECYLVLPVHTAQHTLKLLSRNWRGFFRAIKEWKAKPERFFAEPNQPRYKPKNGECVAIFSNQQAKIRNGWLVLPKKVGLNYKTRLTASTRLKEVRFIPRRVGYTLELVYEKFIPKQRKKLTRKGAIDLGSVNLVTFVDNLGNQPIVIKDHGKGIKSIIQYYLKVQTKLRAQYVQQQKKQLKQQNRVIYGQAYYRLREKFRKKLKNAIHHLTKFLVDLWVERDLHEVIIGYNPTWKQQMNLGKKTTQIFVTIPFLQIINQLKYKGKERGIHVDLIPEEYTSKSSFLDNEFPQKRENYAGKRSSRGLFSSAQGHKINADINAAYNILIKSDPKALPLRSVNGVGGYVMYPRRVCVDPQGMTLTSSTKYAQPCLLTMQT

SEQ ID NO: 1015 - protein, 399 aa, synthetic construct
  REGION 1..399: note = Synthetic
TSVLRTERIKMKQNFTLKQLARQSKNLYNYGNYIIKKQLERSKYLTKEYDLANMLRYHPCYTKMPAHSAQQTIKFLCKSWKGYIRAKRDYKKHPEKYNFEEPKEPKYKKKRGFHTVYFTADQVSLKEGSYLHFPKRVGLKVETRLATNTKINHARLLFKGTCFILEIVYEQEIEELGDLKAKHILSLDLGVNNLLAGLSNSMSPFIICGRKLKAINQWYNKEKARIQSVYDLQGVGEYGQKMKKIIDKRYWRMEDYIHKASRKVINVCADNDIDTIVIGYNQKWKQRTQMGKRNNQNFVNIPFLKLIQKIQYKAEEAGIQVILTEESYTSKSSFLDGEPIQKHVRYLGRRVKRGLFRSKTGLFLNADCNSAGNIGRKVFPVLFNYGTVDAVSHPVCLTV

SEQ ID NO: 1016 - protein, 282 aa, synthetic construct
  REGION 1..282: note = Synthetic
VFQNHKIMDLEVRTRLDDNRNLREVRIIPLGSGYNVGIVYSKEISDISDLNPKRILGIDMGVRNIVTIGNNMSEEGIAVKGGVLRSINQYFNKELSKLKSVSDRQNDGKGNTRRIKNLYAVRNGKIKDIMHKLSRAIIRYALSMNVDTIVIGHSQGWKHTPDMGKKNNQNFVQIPFNILIEQIRYKGQEAGINVIVLDESYTSVCSFIDNESIEKHETYMGKRIKRGIFRSHKGILIHADLNALYNTIKKAISEAFADGIEGIGLYPRSLSIREMITSKGLR

SEQ ID NO: 1017 - protein, 410 aa, synthetic construct
  REGION 1..410: note = Synthetic
KRVVRTETMRIPLSDPLSSMCHVSKNLYNTTNYMMRQEFFHEKRVKTTNYDMNHALKDDLNFMVLPSQTAQQTIGMVYRNWKSFFRSLKEYRKVPSKFTGRPKIPKYLKKNGEYLLLFSNQQCRITRSGILKFPKKMSLEIRTRFDHTLDLREVRIIPRGVGYDIQIIYRKEVYVDEKENMNPKRIMGIDIGVRNLVTIANNFSEQGIAVRAGPLRSMNARFNMIVSSLMSVYDRQDDERNSEMKLKRITDSRNFWMKDMMHKISTWIVNYMSSLNVYAVAIGRNPGWKQNVRMGKRNNRIFVQIPFATLISQIQYKAEEKGIAVILTEEDHTSKCSFLDTEEIRHHAEYKGKRVSRGIFRSSNGTLINADLNAAYKIIKRVFPDAFADGIRGAGLHPVGLSMKDMINPQ

SEQ ID NO: 1018 - protein, 492 aa, synthetic construct
  REGION 1..492: note = Synthetic
GTNLRSEQIIISKESYPSIADKNSILASIDNISRCSHKSKNLFNQSLFQIRQAFFGKMNDCKDEKEKELRIKIRSALNKFKENGFNYKNAVYKLLDKYFKNQGNESDNYSWSAQAAQQTINSAVEAWYDYDLAREDYEKHPEKYTGRPKIPKYRKGSEYIAVFTNQQCKVETKNVFVPESIQSERIRYVKKNFVTFPDHLRIKPIETRLSDKDGDLREVRIVPQIKKGCYKVELVYRKVIDKEKIRELNLDPLRVIGIDTGQENIVTIANNIGSSPIVIKGGVLLAINQWFDKIGSKLYSVYYRQQKTVEGKTVPIGAKMRNLSFNRKNLVLDILHKISRFIVNYCVNNRIGTIVWGRNPGWKQNISIGKRNNQKFTKIPHYLLFKMLKYKSEENGIRVIDVEESWTSKCSFLDQEPIGHKDKYVGRRIKRGLFRSSLGIIINADVNAAYNLIRKVFPEAFRTIGIGGVVLHPERLSIKDLLSNRPAIVNLR

SEQ ID NO: 1019 - protein, 411 aa, synthetic construct
  REGION 1..411: note = Synthetic
MNVKRTEQIWMRSDKNISSLCHISKNLYNEANYLIRQEFFKNGKWVRYNELDKELKESENYKSLPAQTAQQILRLLDKSWKSFFKVIKEYKAQPNKFKARPKLPKYKKKDGEHVLILTNQQCKIRENRTIKFPKLLELDIKTRLDKKTNLREVRVIPKGVGYVVEIVYAKEVDTKNVNEDRICGIDLGVRNLATIGNNIGEGEKPIVVKGGICKSINQFYNKEIGKIQEIYTKQGIKIGKRSKKLFNKRNRKIKDHLHKVSRFIVDYCVKNDIGTLVIGQNEGWKQNTNIGTKNNQNFVQIPFFMLINQIKYKAEEKGINVILQEESHTSKCSFLDNESIEHHDLEKYIGKRFKRGLFRSAKGIIINADVNASLNIIKKAIPKAFAKVEADEIEDVGLHPLRCLMASYKGI

SEQ ID NO: 1020 - protein, 255 aa, synthetic construct
  REGION 1..255: note = Synthetic
VTKTLHEIRIVPEGNRYKIEIIHEHATPEPASQKPCQIANIDLRLNNLVTLTNIIGEIQIVINVRIVKSMNHYYNQKKSKLMSIVGDRGTSDRLWKLSLKRDHKINDQMHKVSRFIVNYCIAHEIDTIIIGKNDEWKQEINMGKRNNQNFVPIPFKSLLEKLAYKCEDAGKRLVKQEESYTSKYSFLDGESLEHHDAYPGKRIEGGLFRSAEGTWINADVNGSYNIIRKAFPDAIQLAGGDTRCALHPIRINITR

SEQ ID NO: 1021 - protein, 396 aa, synthetic construct
  REGION 1..396: note = Synthetic
IIVKRVEQIQINKNHELWTYCDKICFAAKNLYNYANYITRQEFINNKKWIRYRDLNKMLKEHETYKNLPAQTAQQTLRLLDRNWKSFFRAIKEWEKDKSKFNGKPNLPKYKKKNGRSVAILTNQQCKIKDGYLTFPKTDLRLKTRITGNLREVRIIPKGSIYVIEIVYEKEIAEVKRPPKKIAGMDLGLNNFVTLVNNIGIKPIVINGKVIKSINQYYNKKKAELMNYVGDRGTNNRIKKLSIKRDNKIKDLMHKISRFIVNFCKQYNIDTLVVGYNPKWKQEIELGKINNQNFVSIPYYQFINMLKYKCEEEGINLILVEESYTSGCSFLDGEEVSKENYDPSRRIKRGLFRSNKGILINADVNSAYNIIRKVFPEAFAEGIEGVGLHPVRLNVA

SEQ ID NO: 1022 - protein, 522 aa, synthetic construct
  REGION 1..522: note = Synthetic
SFETNEDKKDSENEKDIDQKIVSRYLNYENDFSKMMRVTEEYQALPAQTAQQTLKLHDQAWKNYWLLKKDFNLKRKKYGLNSEECPPRPGIPRYKDSDGEMVAIIPTAGMFYVAKYKGKIYENTYTKHFVNTLRITKYKSHFRATAEIKFPEKTNLSPIRFRIPFFKTEQDVKDFKELDHPEQIKFLRNRIQQFRIVPKSWGYKAEMVYKVPLEELNLEKKKAKLDPNRDAAIDIGVNILAAIANNFGENPILIYGKRVKEINYYANRFYAYLQSAIDFMKNEDNLTWKRIDEIINALPPDLKKIVKFKRKTIRKSSDMVQELKKLQRQVAKKRYNRLENEFHRVANRIRDDFVKHRIGIVAIGRPKGWKKDIKKRVHRKTLDKFNRKFQMIPFDSFINKLWYKLAKEGIKVVTGSEDYTSKCSSLDQEKIGKHKRYLGVRAPYMKGRRKGGIGTKYYKARGLFKSKKYGYIHSDANGAFNIGRKLLPSYFSNIPRSDMKLSPIGRFKFDKSQYVVTPPNSP

SEQ ID NO: 1023 - protein, 535 aa, synthetic construct
  REGION 1..535: note = Synthetic
NIIYRTYTIHIKDNNQFYKNLIDIGKINKAIFNSIIYFFKQNYFHYQNLIINNQIKDNPIINIKYKDLINFFSDSPKWTIKEQQLYNPMNILPNKDLYQSQNAQVSQQTIISAFETIKSFINLQKQFIKGKLKYRPNLPKYIRNDTYVSTFTNQLCNINYQDINNIYNIKNLKTKIKIIKYKKEKNILIYDQIKKLNLDINKFNKIIVFPKGVLQDFIININHINNLHAFKELRIHFKHNIAIIDVVYEIKFKQKKQRYKYKKRYCGIDLGVNILAASSFSCNIPNLLIKGNEIKAINNKYNYFISKYQSLNMLCGRYKEYIFENETDEYFKNGIEDIIYDTRIKLDNNGNKYIMKSNYNTTKRLHKLWLRRENKIKDLFHKVSKKIVDYCYKHHIDIIIIGRNKNWKIKKKGMKNFVRIPFYKLVQMIKYKAEEKGIRVEEVHERYTSGCSVLDRELPMKKYYNKSRRMTRGLFKNNMGKYIHADINAAYNMILKWKYIKTRNKKWKLFKAIRKLYTGMLLSNYYDMIVIDKVL

SEQ ID NO: 1024 - protein, 419 aa, synthetic construct
  REGION 1..419: note = Synthetic
RVERHVVLKSNINHKQIDDLAFACKNLYNKANYVIRQKFFETSKLVEIGELEHTVWVRYHELDKLAKSEEWEEYRNLPAQTAQQTLMLLEQNWKSFFAAIKTFKTNGSLGIPKLPKYKHKTKGRFIVIFTGQQVKLKNGFIHFPEKANLQSIRTKQAEIKQVRIIPQATCYIVEIVYGREVNKDENLNESLYLGIDIGLNNLVTATSNDVGLQPFIVNGRPLKSINQYYNKMKAILQSYIGNGTSNQINSLTHKRNNLVQNYLHHASRFVIDYCQENHIGNIVIGKNDGWKNKINIGKRNNQNFVQIPFANLIKQIQYKAEEVGISATLQEESYTSKASFLDMDRIPIYGKKSKLVNKFTGKRIKRGLYKTDSGRMINADVNGAYNILRKAIPKVFTDGIEGLGLVPIKMSTLNFNKGY

SEQ ID NO: 1025 - protein, 449 aa, synthetic construct
  REGION 1..449: note = Synthetic
RLERHVIRKSDPNWQACHKLCSLSRKLGNCAVYLLRHHYFEKQPVLTRKELDDALKLHYISDYRAMPSAASAQRQSQVIAKQFKAFVKVTAEYYKHPEKFRGKPKLPGYKRKYRTFYVGRNGYQIQNHQLIITGGEAIGFSPMTVLCCEHQVFNAKAHEAVVGDLRIVPMGNTFVVELTYRSEKQEKDLSKCVSLDSNEALFCDLGLDNFATFVSTKPGVRPFLIKGKVLKCINQNYNKQVSELRSKGHKTHIRTKGVKRYWRLHDLLHKASRMVINFCLAHDLGHIVIGVNKEWKQEVNIGKRNNQNFVMLPHGKFVEMILYKAQDYGIDVTIREESCTSKASALDFDEIPSFDEKGSTPKPIFSGKRIKRGLYRTAKGLLINADINAAANIGRKELGDEWLKQLLGLDGGVLVDTPAVVRNLHAGADSRQWLELGIRSQETVHVSAR

SEQ ID NO: 1026 - protein, 367 aa, synthetic construct
  REGION 1..367: note = Synthetic
MPSAASAQRQGQVIAKQFKAFTKATSEYYKHPEKFRGKPKLPGYKRKYRTFYVGRNGYQIQNHQLIITGGEAIGFSPMRILCCEHQAFNAKANEAVIGDLRIVPMGNTFIVELTYRARREEKDLSKSVSLDSSEALFCDLGIDNFATFVSTKPGVRPFLIKGKVLKSLNQNYNKQVAELRSKGHRAHICTKGVKRYWRLHDLLHKASRLVINHCLAYDVGHIVIGVNQEWKQEVNLGKRNNQNFVMLPHRKFVEMIRYKAEDYGIRVTVREESYTSKASALDFDEMPTFDKKESGAKPVFSGRRIKRGLYRSAKGQLINADINAAANIGRKELGDEWLKQLLELDGGVLVDTPVVVRNLHASENFRQ

SEQ ID NO: 1027 - protein, 437 aa, synthetic construct
  REGION 1..437: note = Synthetic
EEIRIGRNHALFPACEKACFHTRTLYNSGNYQLRQAFFKHEVVDYRKIDKCFKQNNDPLYRRMPSAASAQRTLIVLQNDWKSVFQATKQYEKHPEKFKAKPKIPRYCKGKKTFVVERNGFSVKDHILCITGLGSLKIRCVANQQFNEKKDRSVLQEVRIIPRNGIYVVHLAYKEANRYDARTVGLDSARILGIDLGVTNFATMTAVGPDTENLYPLIAKGGRLKALNQYWNKQCAELKSRKKYGHLGAKANRRAFRIKDYLHKLSHFVIEYCLNHGIGRICIGRNKDWKQEVNTGKRNNQSFVQIPHAQFVGYLRYKAESVGIEVIEVEEAYTSKASALDLDPIPEYGKGKEVKFQGKRVKRGLYRTLSGRLLNADVNGSINVIRKLFDKEVRDALLGEPAVGGRLFRPKVLDANSGTFRIRESQCSIETARRSPRL

SEQ ID NO: 1028 - protein, 298 aa, synthetic construct
  REGION 1..298: note = Synthetic
VANQQFNEKKDRSVLQEVRIIPRNGIYVVHLAYKEANRYDARTVGLDSARILGIDLGVTNFATMTAVGPDTENLYPLIAKGGRLKALNQYWNKQCAELKSRKKYGHLGAKANRRAFRIKDYLHKLSHFVIEYCLNHGIGRICIGRNKDWKQEVNTGKRNNQSFVQIPHAQFVGYLRYKAESVGIEVIEVEEAYTSKASALDLDPIPEYGKGKEVKFQGKRVKRGLYRTLSGRLLNADVNGSINVIRKLFDKEVRDALLGEPAVGGRLFRPKVLDANSGTFRIRESQCSIETARRSPRL

SEQ ID NO: 1029 - protein, 411 aa, synthetic construct
  REGION 1..411: note = Synthetic
ERIYVRPNNENYPAISKACCLAKSLYNAANFIIRQAFINENKLILSTEVDKEFKNASHKCYCNMPSAASAQRTIQILGKDWKSFFAANKAYKNSPSKFTGRPKLPKYAKHQKTFVVGRNGFKIQDGYVYITGADKLGLKPFKIICCQQQAFNEKADKAIVQDIRFVPLGNCYFIDVVYKNEDVAKDVALNKKNIMGIDLGIDNLATIVINQPGSCPVLINGKTIKTINNSYNKERARLSSIGKLDLIPARSAKRYNWINDYFHKVSRYIVELCIKTGTGTIVIGHNNGWKQSCNLGKVNNQKFVFIPHNSLIEKIKYKAQEYGINVVVVEESYTSKASSIDLDPIPTYGQVKNPVFSGKRVKRGLYKAKNGALLNADVNGSINIIRKAFGDDPVKGILKCGSIYQPKRITL

SEQ ID NO: 1030 - protein, 420 aa, synthetic construct
  REGION 1..420: note = Synthetic
KMPQRVERIVVKPGHTHYDACHRLCSVARKLGNQAVYIQRQKIFAKEPWLNRVKLDQAVRLTSAELYKSMPSAASAQRQTQIIHEQFVSWHEAKKAFLADPSKFKAMPRLPGYSKKYRTFVVGRNGYKIVDGELILTDKKKVGFPALKIRSCDNQLFNAKTNETVIGDVRIVPHGNAFFIELTYKVNCSTTVLLDGSRACLVDIGLRNIVTLASTASGIRPVVVKGGKLKSINAMYNKDVASLQSHDKKAHRLTKIMKRTCRINDVMHKVSHYVVQFCLRNDLGTIIIGHNEGWKQNINLGKVNNQNFVYVPFNRLIQMIRYKAEAYGIKVIVREESYTSRQSALDFDLLPNYGDKNADQVQSSGKRIRGLFIRSNGQKINADVNACLNIGRKELGDDWLKKLVETDEGCLMQPVTVQIG

SEQ ID NO: 1031 - protein, 420 aa, synthetic construct
  REGION 1..420: note = Synthetic
MSQRVERIVVKPGHTHYLACHRLCSAARKLGNQAVYIQRQRIFAKEPWLNRVQLDQTVRSECTESYRNMPSAASAQRQTQIIQEQFVSWNKAKKAYLSDPSKFQAMPRLPGYSKKYRTFVVGRNGYKVVDGNLVITDKNDIGFPRLPIRSCENQPLNAKINETIVGDVRIVPHGNAFFIELTYQVACSTSILLDGSRACLVDVGLRNIVTLASTISGIHPVVVKGGMLKSINAKYNKDAASLQTHGKQAHRRSKVMKRICRINDNLHKVSRFVVKFFLQHDLGTVVIGHNDGWKQNVNLGKVNNQNFVSIPFNRLIHMIRYKAEEYGIKVIVREESYTSRQSALDFDPLPNYGDKNANQVLSTGRRVRGLFFRSNGQVINSDVNGCLNIGRKEFGDDWLKKLVETDKGCLMQPVTVRIGQ

SEQ ID NO: 1032 - protein, 441 aa, synthetic construct
  REGION 1..441: note = Synthetic
VELIRAERIVIKPGHVNHAACKRYCGAARRVYNAALYQMRQALFAEAPISASQADKVLKQTQRETYQLLPSAGAQRTTQVLGDNWKGWLAAKKDYEKHPHKYPSRPKLPNYARAAKAYVVGRNGHKIEQGRLFLASGKDFGFQPLKVTCCQNQPYNSKASETIVNDVRIVPLGTAFVVELVYRETVEPPPKPNPDNAFGIDLGIDNLVTIVSTQQDYAPVLIKGKAIKSINAKYNKLKAQLASNGKHGHISTKSRRRYSQISDYFHKVSHWLISECVRTDTGRVVIGLNADWKRSVNIGRVNNQKFCAIPHRRLLDMIQYKAERHGIEVVIREESYTSKASCLDLDAIPDYQAVKEGKVVPLFSGRRVKRGLYKTGSGVLLNSDVNGAANILRKEIGDDWLISQIEAGKGVMDTPVAVKHIDLLLEAGLRPRETMSNREAA

SEQ ID NO: 1033 - protein, 436 aa, synthetic construct
  REGION 1..436: note = Synthetic
STHIRTQQILIRKNHEAFRGASVCTQIVRRIKNATSYVMQHHPDGKDQMLSHRDADKWLKRNNPELYTKLPSAIAQRSTQIVGQEWKAFFAALAAFKKTPSAFKARPQKPRYARKAATVHIGRNGFKFVDGTLYFANGVLPPIKTQFRFSQKWNASVGDTVALEVRIVPRGNCFIIEIIYNESKIVEAGNFCRLLDQSRKAGIDLGINNLIALATDQPGVRPVLINGKALKSINAWYNKRVAKLRSQGKYAHIRAVTNKRNRRIKDLLHRASSKVIAYCLENNIGTLVIGYNKHWKQEVNIGRVNNQKFVGIPHAILISQIQYKCQSLGITTVIQEESYTSKASALDNDFLPVYGEKPKNVLPLFSGKRIRRGLYQSKHGIINADINGALNILRKATGEALGLACKGCVSNPITMDLLPRKSVVIRRENTAQPMAA

SEQ ID NO: 1034 - protein, 434 aa, synthetic construct
  REGION 1..434: note = Synthetic
KSHYRAERIVIRQGHEAFKASAYCCQIARRIKNATHYLIRNQVKDNGKPLSHSDADKWLKKNNAELYQKIPSAMSQRTTQICGQEWSGFYGAIKDFAKNPTRYKARPKPPKYAYRASTLHIGRNGFKAEDGVLIFAGAVLPNIKTSFTFSQNWNEITENTIAQEVRIIPNGNSFTIELIYNAIKLQQTGDFCLLLDKSRQAGIDLGINNLIALASDQPGIRPVLINGKPLKSINAWYNKRAAKLRSQKKYSHLKPISNKRYNRVRDCLHKASRYVVDYCVSNNIGTLVIGHNDGWKQDINIGKVNNQKFVNIPHSILIEQIQYKAYSAGITVIVREESYTSKASALDNDDIPTYGDSHIVAFSGYRAKRGLYKSTLGMLNADINAALNILRKETGKALDVLACRGCVSQPILITLGKPNVINIKRKATRLPKAA

SEQ ID NO: 1035 - protein, 440 aa, synthetic construct
  REGION 1..440: note = Synthetic
MFGKKTKSEFDDTSRVLMCNIKNGSANFHASKRLTQITRRLSNRANFIMRKDLFTDRKPNQSKVDKLLKQGKLNVLDKDLYRRLPAAISQRTIQIVGDNWRSFAAAKADWKKNPDKYLEMPRPPKYVKWAKTVYIPCSSFRIENNKIIFAKNLNLDPVSLEKGKFTDQKFNPKASEKVVNEIRIVPTGSGFRFEIVYDKHKLNQSKLLSDNTRSVLLDKSSFLSLDLGLNRFAALVSNKAGFVPLLINGGELKRINQWYNKRCAELRSLGKHKHIAAVSAKRNRRIKDKLHRFSRYIVNLCLKEDIGTVIVGKNKLWKQDINIGKRNNQNFVNLPHAMFISILSYKLREIGVRIIEQEESYTSKASFVDNDEIPTFDKNEPNKKYEFSGKRYKRGLYRTKEGLIIHADINGSGNISRKAGYEGANLVSGGVVFTPILIGI

SEQ ID NO: 1036 - protein, 443 aa, synthetic construct
  REGION 1..443: note = Synthetic
MRSERVLIKPNHDDYSSCKKIARLSKQVFNQALYYKRQAFFRSEFLSFSNLDQLMKIHHKSLYDSLPNAGSQAVIKKLSGDFDNFWKALNDWKAHPEKYTEKPQIPKYKKQGQLKTFLLPAKPISVKESHILLPKKMNISPVISRFAEDKKANSSCDIFKEIRIVPHGSCFWIEIVYDETQSKNHFKQNVKLNPDNKLAIDIGINVLMAVTSNQANFKPVLINGKPIKSINQYFNKQKAKLMSQSKKRKINRLSIKRYNQIRDYFHKCSNYILQLCLKHDVGEVIIGKNKNWKQAVNIGKVNNQKFVSIPHFQLIGQLKYKLEAYGILVREREESYTSKADSLACDKLPAYKKGVSHIFSGKRVKRGLYRSSTGKTIHADVNGSLNILRKASNDDFIEGLIRSGCVFQPSYWTPNGSVVKKSKPLDCFSDGADFKLHLNGIAI

SEQ ID NO: 1037 - protein, 411 aa, synthetic construct
  REGION 1..411: note = Synthetic
IRTEKILVREGHPEYKQYRNVCKISTAIYNCANYYIRQNFFNGYFNINWQSADKYLRQKYNSLYNALPNQSTQSIIKKLGDDWNSFYKANNAYKLDSSKFNSKPKPPKYKKGLGIFISSFQSMSIKNSEIHFPKKMNLNPVRIHCCDNQILKAKQDEQVVTEIRILPKNKAFYIEVVYNKEINNDILLDKSNVLGIDLGLNNLLTITTNQSDLTPILINGKIIKSINHKYNKSKAYYQSNGNHNMINRIGLSRHLSIKDYFHKASNFIKEYCLKNNIGKVVIGNNKQWKDKINIGKVNNQNFVSVPFCLLISLITYKCEEYGIEVILQEESYTSKSDALACDILPIYDEANKTEYKFKGKRKSRGLYQSSKGLLNADVNGCLNILRKVIGDGFIRNLINSGCVFQPVRVNL

SEQ ID NO: 1038 - protein, 404 aa, synthetic construct
  REGION 1..404: note = Synthetic
VTRVERHIVDVSQPLIDLSYASKNLYNCATFIMRQNFIKNHKIINYNTMDKIIKRDYPDVYKGLPAQSSQQVLRLIEKNWKSFFKANQKYKQNPDKFKGKPKLPKYKDKEKGLNIVIFTNQQCKLRDNQIRFPKKVGLSELNTTVDNLQQVRIIPKYQHFVIEVVYKKEVSNYELTHDNILGIDLGLNNLATLVSNQPDVNPMLINGKPLKSINQYFNKKKAKLMSFIGDKGTSYSIARLSRKREQKIDDYLHKASRNIIDYAVETNSGLIIIGENKHWKQEINLGKKNNQNFVSIPYDKFKAMIEYKAEDFGIDVIFTEESYTSKSSHLDNDPLPVYKKGESHRFTGKRVDRGLYRWSKGIINADLNGAIGIIKKVVPEALDFLIEIRNRGAGFAPFKVVNIS

SEQ ID NO: 1039 - protein, 393 aa, synthetic construct
  REGION 1..393: note = Synthetic
VERHIIKDNRFEDICLKSGLLYNYVLYLVRQGIFNKEYLEEYDLSTKLCRENQVDFRNIPNHVSQQVIKQVFQNIKSWIKIKKDFDKNPGKYNNHSPRLPKYKKGKKQNMVIFTASSCRIKNDGYIHFVKKVIEPIKTNVKNDELKQVRIVPQATCYVVEVIYERDENDLCLNKDNFLSIDLGLNNLCSCISNVGVKPFIINGRVMKSLNRWYNKKKARLMSYIGDNGTSMRIRRITLYRNCWIDDKIHKISRYIVNFCVSNNIGRVIIGLNKDWKQKINIGKRNNQHFVSIPHSKLIDKIIYKAKLLGIEVVTHEESYTSKIDHLAFEEMKHQDNYLGKRKRRGLFQSSIGKLLNADINGTIGIARKVIGDSCINTIVGSGFAFNPIRLNIL

SEQ ID NO: 1040 - protein, 391 aa, synthetic construct
  REGION 1..391: note = Synthetic
VEKHVVLDDRFYNICNKSALLYNFVTYHYRQAIFGKQEYFSEFEMSTICAEFNQEDYRALPSQTSQQVIKQVFKNFKSWIVAKKEYVKNPSKFLGKPKIPKYKDGKKQNIVVFTNQQCKLKDGLIHFPKMVNLAPIKTKVNNFCQVRIVPMATCYIVEIVYERKEINLGLSKENVLSIDLGLNNFATCVTNVGLTPFIVNGRPIKSFNHWYNKKKAKFMSYVRDKGTSKKLQQLNNYRNFWIEDKNHKISRYIIEYCIANNIGRIIVGKNDSWKQSINLGIKMNQKFVEIPHAKLIQKLEYKSQLVGITFEITEESYTSKIDHLAGEEMKKQERYLGKRVKRGLFQSSIRKLLNSDVNGSIGIGIKVIGNSFVQRIINSGQVFCPKIVNIF

SEQ ID NO: 1041 - protein, 396 aa, synthetic construct
  REGION 1..396: note = Synthetic
QLTERHIIHNSKQLEELCAKSKRLYNYTLYHLRQALFGKIEKFTEFELIKLMTEFNQEDFRSLPNNISQSVVKNCFQNWNSYWKALKDYKQNQQKYIGRPKLPKYKEEQFVINFTKNTIRFKNDDVTFVNKIITSLKTQIPKEQIKCVRIIPKANHHIIEVIYEKETANLNLDKSNIVSIDPGINNLLTTVNNAGALPFIINGKNLKAFNQWYNKEKSKLQSQLPQGKHWSKHLSNLTNYRNRYIEDKLHKISRFVIDWCIQNNIGTIVIGKNDGWKDGCNMGNKTNQHFVQLPHAKLIQKIQYKAELVGINVILTEESYTSKIDHLIMEPMRHRTMYNGKRVKRGLFRSKHPRITHINADANGAMGIGRKVFGNDFTRSLTNSSCAFQQYKINIL

SEQ ID NO: 1042 - protein, 412 aa, synthetic construct
  REGION 1..412: note = Synthetic
KVQLVERHIIRPNDKRFAKIKDFCHLSKNLYNYANFILRQEFIANKSIPKEYDLSKTLANDNQIDYRALPAQTAQQTIKLLYKNYKSFFSALKSYKKDKRNFTSNPKLPKYKSKNGVSIAVLTNQQISIKKGAKNNKIKFPSKINLKSLITKIDLSVSTIKQVRFIPKTTCFIVEVVYEKELLTQNSFDKNSFISLDLGLNNFVTAIDTKSNKPFIINGKGIKSVNQFYNKLKANYQAKAKSSNNRYFTKRLNNLAFKRECKINDFMHKASDLIIKHCLEYKIANIIIGKNKEWKQEINLGKKTNLNFTSIPYQSFIDKLSYKSALNNINFTLTEESYTSKCDHLADEEMKHQENYLGKRVRRGLFKSSINKTLNADINGAIGIARKVFPNAVQTLRDSGTAFVPVKISINF

SEQ ID NO: 1043 - protein, 428 aa, synthetic construct
  REGION 1..428: note = Synthetic
LSRVERHVVKRADKNYNNIKELCHRCKNLYNYCNYILRQSLFREEGLPNEYSLTGLLAKENQDDYRALPAQTAQQVIKLLYRNWKAYFQALRSYQRDKSKFLGCPKIPKYKPRGDKGHSVALFTNQQVKLKNGKIIFPKPANLKPIKTKASSIEQVRIVPSTACFIVEVIYEKEITPAETIDGSVASIDLGINNFVTFLDNQGYQPFIINGKGAKAYNQYYHKEKARLQSELKQGKYSSKNIQLLGLRRANFMQNFLHQSSSIVIKALKDRKISTLVIGLNEDWKQKTNIGKANNQNFLSLPHRKLIDQLVYKCEEVGIEVILTEEAYTSKIDHFVEEEMKHHDKYAGKRIHRGLFRSSTGIYINADLNGALGIMRKVFPEKALAIAELIRNSGVAFTPIIIHPINCHKVNTMALGNRIRMSTMKKAS

SEQ ID NO: 1044 - protein, 404 aa, synthetic construct
  REGION 1..404: note = Synthetic
RVERHQLHDTYLDRLCFLSKNLYNYVNFLIRQEWIDTKVYLNAYELVGKLAAENQPDYRALPSNVSQQIIYQLFKNWKSFYGASKDYQRHPEKYKARPKMPQYKHKTDGRNLLIFTRDACRLKAGYIHFAKDNIKPIRTKVEKIKQVRLVPQSSSFVLEVIYEKEKKHHELRGDRYVSVDLGVDNLATLVTNLDSRPLLVNGRIVKSWNQYYNKRKAYLASIGASRQIGRLGLKRLNTINDYFHTTSRFIITYCLEHQIKGLIVGYNKDWKQDVNLGRVNNQKFVSIPYQNLIQQLQYKAEEVGIEVAVQEESYTSKCDALALEEVCQHEQYLGRRVKRGLFQSSVGRFINADVNGALNILRKGIGDHFVRNVVGDDFARNLLNRGFADNPVKVDFLHECSCLA

SEQ ID NO: 1045 - protein, 707 aa, synthetic construct
  REGION 1..707: note = Synthetic
KINLTYTVNKKSIPDFYCEVLNCYGLSAKNIKNSTLFIIKNILTSYTYDKDLKTYTLKNNLHQNQLDIISTVNQTISTLNAKLKAKYEQKLNIYNKDKEKYEEDNKNKEQKEEFKLKEPKLIQFNEYSQTIDSKTYYQIINKTLLENVIKTKELNNKINNINYQDYSEVHSHLAQSVVQQVCDEYHYYFKALKEYFIQHKDKTINNSENNNFTGMPKEPQYKAKNSKITFELCTERFNNNGTVLIIGNKHKLYKDYAKKELLKPEIIDKFNSFNLMEVISNDLKEKNIHYLNNINNYDIVGIRVIPGKYKKLPKIEYIISFEKELKGFYPDLMNKAQQRYNKDFFELKSNLQLSIIKDYFNNDYKDLNNQLNEDLNNNTSKVNNNNSVPYFMGLDLGVVNFAAVSFYTANRDKNYVISGKTLKSRISQLDNRIDKKKKELCIDTIKLIQSKKDKKEVLTRQELNLLSEYYKSIYNDELISQSQERKNNISSDYIHKLSKCLIDECIKKNIKVIVVGKNKGWKQEINNGAKNNRDFYNFPHARFIEVLKYKGLLKDIVVIEVEESYTSKTSFIDNEELRVYQDKRSKDLDNSEERNLTQGNKNQLSKDVSKSTIKNNKIKLLGKRVNRKFITKNGKIIHADINGSFNIVRKVLLNFKYNKETINLSYELMELNMSRKVKLNNFYAQSLIKKQKLKEIKCEQSGVALSF

SEQ ID NO: 1046 - protein, 430 aa, synthetic construct
  REGION 1..430: note = Synthetic
HTVQRVERHLIKKTSKDFKVLDELCFNAKNLYNFTNYIVRQAFTGHKELIPEYEDLITNERFISEYDLVKRFANQNQQDYRSMVSAWSAQQVVYQVFENWKSWFKVLKAYKRDPSSFTGCPKMPGYKDKKNGRSMLVVNKTKPNKDGSISLTKTLKLKIRTKLKSFQQIRVIHNGYYIMVEIVYKKELNFAKNENANSIMSIDLGVNNLASITSDNGMSYIVNGRNLKSINQFYNKKLAKLQQVYSKQKIRTGSVRQRLELKRKNKIDDYFHKASLLISELAVKNQIKYVVVGLNKGWKNEPKMGKANKQNFIQIPFDRFISMLRYKLEERNIKLVTSEESFTSKCSFLDDEDICFHQKYKGQRIKRGLFKSGIGKCLNADINGSLNILRKLDLGKIDVFEKIFRPTKIKDIERNLVSLRVNNSLITSRG

SEQ ID NO: 1047 - protein, 411 aa, synthetic construct
  REGION 1..411: note = Synthetic
RVEKHIIKRNHPDWKICDKLCFNSKNLYNKVNFIIRSAFLGKLENIEDFKDLIKNDRFVGGYELIKRMTELNDHDYRSLKPQSSQQVILQLGTIWKSYFKSLKSYKSNTSRFSGRPKMPSYKHKEKGRYIVTFTNQNISIKNRKIFFSRKDYFKKIRTNKIDFQQIKIVPKLDGSYHLCIIYNKEIENAKGRGYSFGVDLGLNNLMAITSDKVDFRPLLINGRPLKSYNWFWNKNKARLQSELKEKYLSKRITKLTFDRNNKVNDYLHKASRLLINKALENEVTSIVIGYNQGWKNEINIGKKNNQNFVNIPYEKLIDFIHYKAEENGIRVIMVKEEYTSKCSSLDKEEIRKHETYIGNRVKRGLFKTLNRLEINADVNGSLNILRKVIGDDFINLLNIGCVLQPELVKIV

SEQ ID NO: 1048 - protein, 418 aa, synthetic construct
  REGION 1..418: note = Synthetic
VERHIIKDDRFMDICVKAKNLYNQSLYYYRQSIFGNIEYFKEYELTGLFAEFKEENYTSLPAQTSQQIIKLMFKNIKSWQKSRKEYENNKSKFLGKPKLPNYKDKTSICIFTNQQVKIKDGFLIFQKITGLPNIKTKQNNLQQVRVIPKLNHCIVEVVYNKKVPSILKYNGNWMGIDLGVNNLMACTTKDSAFIIDGKRLKSLNQGFNKTRGKLKSILPILPKIKTKTGNKIQKGTSKKINVITQKRNRRVEDYIHKSSRLVIDVAQSKQITKIIIGNNKNWKNEINIGTKNNNIFCSIPHDTLIEKIKYKAQMVGIEMICTQEAYTSKCSALDLEPIEKQESYVGKRVKRGLFKTKKGLLINADCNGSLNIARLGLSASGDEINFSESLVRCVSQPKKVYVLNYKNKLLKVYKDKIL

SEQ ID NO: 1049 - protein, 407 aa, synthetic construct
  REGION 1..407: note = Synthetic
YKMILVEQHIISKNNLLWKQCDHLCFLSKNLYNSTLYRIKNHYQETGKFLRYNHLAKEFLQNDQQDFRALPSSTSQQILMVFDQNIKSFFKLIRKWKNNKKSLSGCPHLPNYKHKIKGRNIIIFTSQQSRVKDGFIHLPKKVDLAPIKTKVKEKIKQVRIVPKSSCYVIEVVYERQEKEHIQNDRYLSIDLGVNNLTTCFDSKNQSSFIINGRPLKSMNQYFNKKKGNIQSDLEKNHKKKTSKRLSKLTMKRNNKIKDYLHKSSGTIVDYCIKNNISNVVIGLNKEWKQGSNIGKKNNQNFVQIPFDKLIKMITYKGQLEGIKVVTHEESYTSKCSSLDLEMLCHHDTYLGKRMKRGIFLSKDWIKINADLNGAINILRKETGDKLINLETLTSRGQAVWPVKVNLN

SEQ ID NO: 1050 - protein, 448 aa, synthetic construct
  REGION 1..448: note = Synthetic
RQNRYHVKKTHPDYELLLDHMRDSKAIYNFANYLVRQRYFRKTGRNFNEKFLDEFADDPALQADIQTYLDGNKMFSSLLKNIVCAVARRFGCKIIAKVVQNVVDKLHEDWNSFFELLKRKKNGDYDKKIRPPRYKKEAFNLVEYNPQVVSKTKLKDGFIGTAKMKKGVKLRRLLPNETVQSFRVYWENERVLLEVILVREIVDMPKENGCDGQKIASVDLGVDNLMTVAFNYERRPVVISGMEIKSLNRFFNKEKGKLQSALPKDVHSSRKIRRLLARRHDEIRNLFGRIANKFISFLLREGVTKLIVGEAKGWKDEVDIGRVNNQNFVHIPFSSLVKILRYKCEDVGILLVAQDESYTSKASFLDNDFVPTYRKLKEGEEKPSYAFSGTRVKRGLYRTKDFIFINADLNGALNIMRKAGDLPPEKTSPLAYLKRYKHLFPISFERVA

SEQ ID NO: 1051 - protein, 301 aa, synthetic construct
  REGION 1..301: note = Synthetic
MKIVQNIVDKLKDDWNSFWKLLKQRQDKTYNKKVSIPNYKRVYNLVEYNNQVMTKKKLKNGFIGTDKMIQGIKIANKHKNLECKCFRIYHKNNKFICELIYEKEIKEIETNNRVASIDIGLENLFTVAFNYNKKGISIKGSKLKSINQYFNKMKSKLQSLLINNNYITNVIKQLLYKREEQLRNYIGYYTNKLIELLKMENIKKLVVGYNKGWKQEINIGSKNNQNFVSIPFRKILNILRYKLEDNGIEYIEQEESYTSKASYDDIPICGRRIKRGLYKTKEGKTINADLNGALNIMKKQR

SEQ ID NO: 1052 - protein, 437 aa, synthetic construct
  REGION 1..437: note = Synthetic
RTGRFKVKISHPDYEMIKVHTVEAKEIYNYANYIIRQLYFKNSGKHEYSAKFIEEYPELNEDFEIYLKENNQFTSTFYRIICKFSRIKEYSLNSKMVQGVVNILKRDWKSYWKLLKLKIDGKYDKDVNIPRYKKKYSAVEYNPQVISKNKLKNGYIGTSKMNEGFKIPKFYKEYSCKSARALWKNDFLYMETIYEKEVPETKSNKKAASIDLGGKVLMAVAYNFNRRGISISANMLRSLNHYYNKMIGIMTSLLPKGIKISRAIQNLWRKRDEQVRNLLGYYANRLVEELVSLNVTKLVIGKNMEQKNGINLHSKLENRNFCMIPFNKLIEILRYKCQENGIECIEQEESYTSKASYLDNDYIPVYGKENQGYEFSGWRNGRIYKIKGKNQRIHADLNGAFNIMRKAGHELIEDISFLKKNWIFPVGKFKVKNLNYI

SEQ ID NO: 1053 - protein, 446 aa, synthetic construct
  REGION 1..446: note = Synthetic
RVIKIYPRQLNNSYDYDLLLSYSHEAKLLYNYCNFIIRQMYFYNSKYEYNYTFDFVYQNEEPKLTGLLINYIEENNLLSTKLSQILCRYALVNNYKLISKVVQAVYRKVKADWTSYFKLLKLKKAGSYDKDVNIPSYKKGSYGLVEFNNQTISRKLLNKGYIGTASMKEGFKLPNWINIENITSFRVNVKHKKLLIEVLYNKKVCEHKTITIDKTKPTAAIDIGVNILAAITFNFNQRPLVVDNLDIKSFNRLYNRDIAKVKSLLPKKVLWSRLLSNITNKRNLRIDNLLGYKTNLIVDEFIKLGIKQVIIGKNKSWKKESSLNKVNNQNFVQIPFELFVQKLSYKLKEKGIFVYRQEESYTSKASFLNDDMIPTFGDKDSFKGFCGFSGYRQNRGLYKIKGKNRTIHADINGSYNIMRKAGVFIDRDKIDFLNKKDITPLNIKVA

SEQ ID NO: 1054 - protein, 448 aa, synthetic construct
  REGION 1..448: note = Synthetic
RVLKIRINDNIISSEYKEKMLKSKEFYNSCLYLTRFRYFEYLGHKDKLDYKVRKTYGLEDWFEDKDVFLSNYPSYGNEFINKVGITINSSLSAKERQTILRKVCTDWKIYFKTKEAMKDTDKKVNIPGYKEYSYLVCEFNAQMIKFGGYEKDHKIGLIGLKNRIGLPLWLKRESIQAVRLKYKNTYLYLEVIYNKDEEKQKERMLKRRVAAIDPGLNSIATITYNFLKKPISISGKHLKSVNQLYNKTVAQLNKEKSEHEKVGDKDKVNKIVDKISKVTEKRNLRVENELHHISCEIVRILVRNKVSKLIFGHNNGQKEDINIGRVNNQNFVTIPFNQLITYLEYKCKEKGITFEIQEESYTSKASFLSNDKMPIFNNNSNQEYSFSGKRVKRGKYVDRKHGIVIHSDVNGSYNIMRKNGVNLSQLQKTFIDKKQTIEPLGIRLYMNK

SEQ ID NO: 1055 - protein, 461 aa, synthetic construct
  REGION 1..461: note = Synthetic
QVIKFSLTPGHSDFKIAQQLCEESRVFYNSVNSCLRARYFHKSTKEYADHIYDIPQQFNIDVTINGSWYSYNWVWENVAKTVRKYLKNKNKVKLLTVKQQQQVIRKLCNNWSSYWELWKLYKKKELTNNPNIPKYKKNFNGIDFNNQMISKSLVKKGVFKLSGLSQGFIIPEYLDKTTIRSGRLVVNNAKSFTVELLYEVDNVYTVADNPVIPDDMLVAAIDPGVDNLFTIAFSDYREALLIDGKQLKDTNNKINHKISRIQSAHDIERNNLMLKTGDMKLPHIQSQRVDDLWDYRDRVLYHDYTTIVNEVVRTLCSTGVECVIIGYNQSIKQHMRMGKKNNRNFAYIPMKKILDNLAWKLSKAGIIVIWTEESYTSRASFIDNDPLPVYGDNTVKVFNGYRKHRGLYVSKNGGSIHADVNGAYNIMRKVVSWFQSKETGMMIRDTVVYPARRVRIISLTV

SEQ ID NO: 1056 - protein, 447 aa, synthetic construct
  REGION 1..447: note = Synthetic
LSSVRRLSFLVTPQHPDFQVFHEQSVQSRVLYNMVNAIARTLYFHNSKHDYGSGIYTIAEQLNYDVTNAKPSYSYMGLLSIAQHLIDNGFFTPPLSFGTKAIQQTIRLLAHNWASYWGMWKAYKRGTLSDRPSIPGYLRDYAPVIYNNQMISKKLLKQGIVRPMPTVVKQGFELPEHIKPSAILSARLIPRAGGQYFELEILYQEHAPQQASGSVTAGIDIGINNLYTIAFDDFTEGLIVSGKTLKHINQAFNYFIDDHRSKLAKHGLTEVTKIERRWWENRRRRLYHEYTTLNNRTVDALVARNVGTVIIGWNDGFKKNSNMGRCNNRKFVSLPHKKIVDNLAYKLESLGINVILVEESYTSKASFIDNDALPVFNKDTNVKYTFSGKRRHRGLYITKHGCRINADLNGAFNIIRKHVPGFSPQADLMVKDAVVYPVHTLQGFHKH

SEQ ID NO: 1057 - protein, 408 aa, synthetic construct
  REGION 1..408: note = Synthetic
RILKFYLNKSHPDFKIARHHAEQARILYNGMNALVRESQRFYIDGDLGSLPISHEIGVVPWVTEGVYPGSSYNLVPIEKAVSSFKSVDLPAKVKQGVSKSLAWSWESCISLRKKGENAGDPSYKKKYCLVQYTSQAISKRGLSRGWVVPTQWKTGFKLPQGVEVSSARLYHSHKDVFVLEVLHKVGITSHKEDGIRSSIDLGLNKVATITFSDGTQPLTVDGAYVKSLNQGANRNSAKREVKNKKAMWKKRNRRINHYFHSASSSVIKTLLERGVNELVIGWNEGFKDSPNMGRKNNQRFTSLPLARFRDMLTYKATQNGIRVAIQEESYTSKASFIDSDPLPVYSRGAKNVVKFSGKRTSRGMYKARDNTMIHADVNGSYNILRKSNPSFGWSSGMVVMPVNLKFAY

SEQ ID NO: 1058 - protein, 431 aa, synthetic construct
  REGION 1..431: note = Synthetic
EYRVHTVRVGAEHPAWPELDRMALAARRLRNAINYDRRQMFFADLEFNENIDRKDRKTTAEWKALPSKVAREVSRGLDADWRSVRVLRRTKGRRAQPPKYLQGRSRYQLRFSIDALRAQPAKRGMLGVAGMKLDLCPLPVSWDRIKEVRILPSGREFDVEIVWVKTVAEPVESPDWSRVAGADLGIDNLITVACDDAAVRPLIVDGRSIKSRNRFANVRSDLYAALLPNLEGGTRQQRDSTRREALWRHRNSVVKAELHTASKRVVDYCRAHHVTTLVIGWNPNWKTQSTTQSTMGRVGNRRFRSIPHRVLVNQITYKARRYGITVLETEESYTSKTSVLAGELPVKHHEYAAQRINRGRLKVLATGQILNADVNGACQIARKCKPEAFSWANGVAGEVGLSRPLEVVTGGGRPGVRTHLGVKCIEGDTSS

SEQ ID NO: 1059 - protein, 429 aa, synthetic construct
  REGION 1..429: note = Synthetic
RRVHSVLIDKNHPVYKTIDDMCWHSRALYNSMNYDLRQSFFDPKQKMPTIGSLRKQYRFDENEHWMSLPAKVAREVALQLERDWKSYWKKRKNGDVLARPPKYHLHNSRRFIEFSVDAITKAGKKSYMLTLSTIKDFIVPLPCKLEDVCSVRILPVRKKFKVEIVHKVKVPMIESVSHEDEVWSGGDLGVDNFLTVTIDNAGIRPLIISGKDIKSRNQFANKHSSNVKRNKSYRKGNDTRSVDDYIRNIWGSRNRYIDGFIHNATSYIVSYLKEFNVTHFVVGWNKGWKSNSVRGKNKGMGRKNNQKFRSLPYRKFLTVLEYKLRDAGIVYLETEESYTSKTSVLAGEYPVEHEDYASVRIHRGLLKNKITGVVINADVNGACQIVRKCKPEAFSWADGVEGKAGLFSPVKVSVGGGCPKLHTESFLCV

SEQ ID NO: 1060 - protein, 497 aa, synthetic construct
  REGION 1..497: note = Synthetic
RVEQRLIQRKDKSYKELDSLCFRSKKLYNDVLHVNRQIFFSNLRKEKRIRKKYKNSPLLEEKLSKFKKNRPKLLSYIELASVFKTHPSYLALPAKVSQHVLKLADQAWISYFEHLKVKKPDEWISPPNYKGSIDQDREDGRQVLFYTYQAISYSELKKGKIKLSGTNLVFRSKVAKLATKHPDKYKINGVRLVPHLDYIMLEVVYTMEVEPASDLDPRRIAAIDLGINNLATVVFNFCKEPVIFNGKPVKSLNRYYNKLIAKARSELERVKGDRKVTRSEGQKQKQDVQHPERNVPVQNVKQKTSHHIRSLYRRRKAKINHFLHNVSQDIVQLLVENQVSTLFIGYNVGWKQGLNLGSKMNQKFAYIPFLTLINMIKYKAEAKGVTVLLQEESYTSKASYLDFDQLPTYQKGVKHKGIFSGKRVKRGLYKTKEGILVNADVNGALNIMRKGLYFLKTGELNPSMIKVIRRDKQRILAFVVKPVMAEMPYEATSNRIL

SEQ ID NO: 1061 - protein, 432 aa, synthetic construct
  REGION 1..432: note = Synthetic
QVERHWIKEGHALYPICDDLTFKAKNLYNAGLYQIRQSIFERNKCDNKEEKPSVLSWIELVSQFRKEKQSDMLALPSKVSTNILKNLGSSISSYYQLLKCFHDKSNTSVSSKPQLPRYLHKTKGRYIAEFTHQTFSKKRGLNGELILCPKDFSLVIPTKVKNPKCVRIVPKLKAFVIEVVYEVEPALLKHTGNYAAIDLGIDNLASVTFSNNVNPLVVKGSKLKSINQGYNRLIAKAKSKLPMSQKTSQHIHRLWKNRELRFQSELHKITSFLSLYFDEMAIETVFVGKNLGWKQGVSLRKKNKQTFTQIPFNAFISQLTYKCLIRGIKVLEQEESYTSKASFLDEDEIPIYEKNNQNQNFIFSGKRISRGLYKSKDGSLLNADVNGSYNILVKGLLTLNKSLNRKNLSFHTRSLKNDLTSVSNVDLLLQYM

SEQ ID NO: 1062 - protein, 428 aa, synthetic construct
  REGION 1..428: note = Synthetic
QVERHWIKEGHALYSVCDDLTFKAKNLYNAGLYQIRQSIFERNKYKEEEKPSVLSWVALVSQFQKEKQYDMLALPSKVSTNVLKNLGSSIGSYYKLLKIFRDKSNLSVTRKPQLPRYLHKTEGRYVVEFTNQTFSKKRGLKGELVLCPKDLSLVIPTKVKTPKCVRIVPKLKAFIIEVIYEVEVSPLKQTGNYAAIDLGVNNLATITFSNKANPLVVKGSQLKSINQGYNRLISKAKSKLTANQKTSQHIHRLWRNREMKLQAELHKITSFISLYFDEMAIETVFIGKNQGWKQEVSLGKKTNQSFTQIPFNTFISQLTYKCLVKGIIVLEQEEYYTSKASFVDKDDIPVYDNAQTKPQFSGKRISRGLYKSKDGRVLNADVNGSYNILVKGLLSLGKILNRETVSFHTRSLKRWQSVSNKTLLSQYM

SEQ ID NO: 1063 - protein, 428 aa, synthetic construct
  REGION 1..428: note = Synthetic
QVERHLIKPSNDLYTICDDLTFKSKNLYNAGLYQIRQSIFERNKSDKKNKKPIPSWAQLISEFRKQDQNDMKALPSKVSTNIIKMLGGNISSYYQLLKGYNDKSNKSITNKPKLPGYLHKTEGRYVVEFTNQTFAKKRGDNNELILCPKDLRILIPTKVDHPKCVRIIPKNNCFFIDVIYEVKEKPLRKSKKYAAIDLGVDNLAAITFSDGTNPLLVKGLKMKYINQGYNRLIAKAQSKLPNNQRTSKHIHRLFRNREMKLQSEFHKITGFLAEYFDEMSLEKVFIGKNNNWKSGISLSRKVNQRFVQIPYNKFISQLKYKCELRGIEVIEQEESYTSKASFIDSDNIPVWKNDGKKYSFSGKRVKRGMYKTKDGLTINADVNGSYNIMVKGLNNFGEILNRSLVSFHTRSFGGYDTLSNKDLVEKYK

SEQ ID NO: 1064 - protein, 421 aa, synthetic construct
  REGION 1..421: note = Synthetic
LTERHLIKPNHQLYRTLDDLTFKAKNLYNHGLYLYRQSYFEHKKNPDVPILTWAKIDNILRKQGHDDMRALPSKVANAVLKNLGENISSFWKLVRLKNKGGLAQKPKLPHYLHKAEGRYPLSFNYQTFGKKRGANGELFLCPKGINLPIPTKVDNPKQVRIVPSHNNFIIEVIYDAQERAPKSTSNYAGIDLGVDNFATITFSTQNQPLIIKGLELKSINQGYNRLISKAQELLPAPLKTSNPIHRLWSRRSWILKTKIHQMTAFLATLFDEMQIEKVFIGKNTGWKQNLPFGKAVKQRFAYLPYETFIEQLQYKCKLRGITVIVQEESYTSKASFLDGDDIPVYGEVENPQFSGRRVKRGLYKAGNGRLINADVNGSYNIMRKGLANNLQPLQMSNPLIHPLVVKGIGKEPNDKLVQSYM

SEQ ID NO: 1065 - protein, 413 aa, synthetic construct
  REGION 1..413: note = Synthetic
LVEKHIVKLNNINYEMFDKLTRLSKNLYNAGLYNTRQHFFATEKHKSWDKIEKEFISTDNIDYRALPSKVAKEIMRSMGQDFNSFFGLLEKKKQGLYDEKINIPHYKDKNGKHLIKFEKQTISKQVVELPNNLFEHTLCKRELNIKIISKQPNIDYVRILPRYKHFVVEIIYTKQEQRQPKIKQKDRKIATIDPGIRNLLTITFNDGRKPVIIKGGPIKSINQYYNKQRAYLQSKLPNDVYTSNKVNQLTTKRNRKLEWTFHNISKNIVNFLVQNEVDTLVIGKNINWKQNVNLGKKNNQNFVMIPFNKLYKQLEYKCELIGIKVKYQEESYTSKANCLNFDKIPIYGKNDENYKFTGKRNRGLYKSDCGKIINSDVNGSYNIGRKAFPKLYIKDGIEDVAGHPTLMNFLKCS

SEQ ID NO: 1066 - protein, 534 aa, synthetic construct
  REGION 1..534: note = Synthetic
LVKKVAVTDVNDAFCCLLLSNTAKKLYNSALYLFKEQYRKNQTTLTYETLDKLMKNETLYPDYARIYQDLPAKVSQQILKLFSQNTKSFFGRKQSKKLTDEERSKKKVNLPKYYTKNGLVVVTFTNQALSKTAFNKEGVIQLSGTDLKIKLDLASLPEIKNFNQINQVRIVPAIKNDKDKRLSDLLEEYYPSSDKTTNEQCGKQTSLFTIEIVYTVPKSEKRNNNKSLELLYRNSVIYKINPKTNKIATIEKEELAEARYTQEFLQSVAGIDQNLDHLAVGVIAAGETTAFNYDIKYLKSVNQYWNKQKAKLQSEISKQKQILQELAEPSEKLDFYQTVLTEYSFSKLIESEKIRLKKLKNKLKRITTKRNHKINNYTHQLSRKLINHLSQLGVKNIVYGKNVNFKQEINLGRVTNQNFVNIPFNLIIERLRYKALLAGINFMTVEESYTSKTSFLDEEKLHSYKRGKPKKGYTFLGDRFARSLFQTKNGYVIHADINASFNIIRKVTGDSVYNFVDKRAIKGSSPKRWKISIQ

SEQ ID NO: 1067 - protein, 365 aa, synthetic construct
  REGION 1..365: note = Synthetic
LDSATIPEITHFGQINQVRIIPSTKNDKNKSLSNLFEEYCSGQIAQPLFTVEIVYTAPLTKQRISNQSLNLRYETKITQKVRKKDNKVYEIKTQELVEVHYKEEFLKSVAGIDQNLDQLAVGIVTPEETLTFNYDIKYLKSINHHWNKQKARLQEEISKQEKLLDDLKDSLELKLINGDSSKSKLVESINNKKILIKRLKNKIKRITTKRNRKIDNYVHQLSRKLINHLSQLGVKNIIYGKNVNFKQEINLGKVTNQNFVNIPFNLIIERLRYKAALAGINFMTVEESYTSKTSFLDREKLHSYKSDKAPKKYEFLGNRFTRSLFKSKDGYIIHADTNASFNIIRKVTGDSIYNFVEMASIKGRS

SEQ ID NO: 1068 - protein, 406 aa, synthetic construct
  REGION 1..406: note = Synthetic
RRVEKHAICRTSHYFSDLCDLTHKSKNLYNASLYAIRQHFFSTKTYIGYSKLAGDFAKTNIDYQQLPRKVSQQTLKLVDQNFRSFFALLKAKKNDKVRIPNYLDKSGKYVTIFTNQALSFVKPGYVKLSGYDIFIKTEKTDIQQVRVVPRSNHFDIEVIYLTDIEDKRSDNSRYLSVDIGLSNLVATASNVMKPFLINGKPLKAINQYYNKRKAELQSKLGDKRKTSNRINAISRKRNDKIRDYLHKASTWLINQLDFNQINTLIIGENKGWKQEINIGKKNNQNFVSVPFNKLKQMLTYKAESRGINVICQEESYTSKASCLSNDMIPTYGEKTDDMKFSGYRKTRGIYKDKCLDLEINADVNGAYNIMRKAVGDVKIDPIEACSWPLSVKISLDTKPKLCHYWH

SEQ ID NO: 1069 - protein, 404 aa, synthetic construct
  REGION 1..404: note = Synthetic
QLTQQIIINNKHRWYSMLDELCFKSKNLYNYALYQISQYYKNTNKYLSYYELNTLLSKENQIDYRSLPYAQCSQQILRQIDKQYVSFYKALKSPKMKGGKIRLPKYKDKENGRNIVTYTNQCFKLKNNILSLKINNYNKINIDTNINVQIVRIIHKGNHIVIELIYNKEYTLKEDNNRYAAIDLGLNNLATLTSNVCQSVIYDGKKLKNINHFYNKRKALLQSKLNGNKKTSNRIKRISYRRNNKIKDYMHKVSHLIVTYMETNNLNTLFVGKNSGWKEGINMGKTNNQNFVAIPYNLLISMLDYKCKLSGIKMIILNEAYTSKCSFIDNEKICKHKTYYGKRIKRGLFESKYGHKLNADVNGSFNIMRLGIQKCNCDVLNVVPADKRYVYNPVRIKINYISLR

SEQ ID NO: 1070 - protein, 403 aa, synthetic construct
  REGION 1..403: note = Synthetic
TTENRVRRIIIRKSDQRYAPLRALTLRSAKLWNVALDRTRSSYQVNGKTTPFEHLDKELASESNEAYRALPAKVSKMVLRDYYAAMASFFKLLACKRSGEYRRRVNLPGRANEHTGRAVTFTKQAVNNGSRDTSFKIGLPADKVELDAGIPKSDVQFVRVVPRSGHLVVEVGVRVKILIGAAKSTDRVAFVDPGMNNVMTVTSNVFSPLLYSGRKLKSTCLFYIDRAAMLQKSGQSTHGHILWTRRSLEVSRQCHEMTNHLVDVLVQNRIDMLIFGHNKGMKTGINLGCEINKSFGSMPIATIIDQLSYKLRAAGIEMVITEESHTSKCSFLDAEEICHHDKYAGSRVKRGLFKASSGKAINADVNGSLNIGRKYLTKVGLYTEELDRQLRAAMHNPRVVKTY

SEQ ID NO: 1071 - protein, 413 aa, synthetic construct
  REGION 1..413: note = Synthetic
LSERHIIKEDHLYFKECDNITFKSKNLYNSCLYTIRQPFINDNVNVSFDLHHLIKNHEAYKELPAKVSSSVILMVQKNFKSYFKATSAFYKTPEKFKGKPKLPYYLNKLDGRFVASYTNQAISKISFNKYKKIKLSNTNIELNTKIKQFTDIDCVRIVPKLGYFVIEVIYTIPDTPLLEDNNNYLGIDLGINNLATLSSNEKSFKPIIINGKPLKSINQFYNKKLSKIKSTLEVRNKKSKSKKLYKLTNKRHFKVETYLHKASKEIVKLAKNNNINTIIVGKNEQWKQNINIGKVNNQKFVSIPHSRFIEMIQYKCEKEGLNFKINEESYTSKASFLDLDEIPTYNSKNKETYNFSGYRKYRGLYKSKITGKQINADVNGSYNIIRKAIPNVFKNDGIEGVGVHPIIKQISFN

SEQ ID NO: 1072 - protein, 413 aa, synthetic construct
  REGION 1..413: note = Synthetic
LTERHVIKKNNPLFPTLDELCFKSKNLYNSTLYKIRQEYFNSGIYLGYYSIQKEFQKTNQFDYRELPIKTSQQTMMLVDKNFKSFFGALKEYQRNPKKFKGRPRIPRYLDSMDGRFIVIYTYQSISKKELENNGRIKFSGVNNVYITTKVQYKDLCQVRIIPRGSHIVVEVVYKKQEKQILPDNNRYAGIDLGVDNLVTLTTNVPKDIPVVWSGKRIKSWNHKYNKDIAYYKGVLDKTNKSKRKKWSKRLERITLKRELRINDCFHKISKDIVNHLVSKHINTLVIGNNKGWKQDTSLGKIGNQNFVQIPFMKLISMLEYKCRLEGINFYIVTEEYTSKCSFLDLEVIGKHNVYLGKRVHRGLFRSRSGKLINADVNGSFNILRKCKPGCFDNFTIKNNGVKGVVVHPIIKII

SEQ ID NO: 1073 - protein, 431 aa, synthetic construct
  REGION 1..431: note = Synthetic
MSEKHIINKSHHLYKEIDLLCFKSKNLYNKALYTVRQEFINTSKLKDEGVLEHANYFNYYDINTQFINSKDVDYCELPRKVSNQTLMLVDKNFKSFFALCKLYKSNKDSLTGRPKLPGYLHKTKGRFVTTYELGAISKPKLREGIIKLSGTNIEFPTINKHNGVLKQVRLVPMSNKKYKIEVIYDVEEQNMNLNKDNIISIDYGVNNLMTITSNVEGFQPRIIKGGQVKSINQFYNKSRAELQSQLPNHLTLKDSNGNPRQLNNSNKIDSLTHKRNCKLENEFHSYSNKIIDLCLQYDIGTVVVGCNKGWKQESKMSKTVNQNFVSIPYTKLTHQLKYKSELIGNVVVEQEESYTSKASFVDDEEIPVYDKKNYVHYVSTGTRKERGMFVTKSGRRVNSDVNGSYNILRKYMKSIGRSLDSSRCLLVPIVI

SEQ ID NO: 1074 - protein, 424 aa, synthetic construct
  REGION 1..424: note = Synthetic
LTERHIIKENHAFFNECDELSFKAKNLYNATLYVQRQSFFNRDVKFVNYYDVNKEFTINNQFDYRELPSKVSQQIQILVDRNFRLYFTLLKKKNKGEYDKPVRIPKYLHKTKGRFVVPYPKDAISLKTDGFVKLSKTGISIPTKVGKNSIVGVRIVPKGNHYVMEVLYDVVKQDIETDYSRVAFIDPGLNNLMTVTSNVFNPIIYNGRPVKSINQLANKNVSKRQSTRPVWKPNARTKNKDRIQQVLLPRLESDNSKLTKSIWSKRANRINDYFQKITSDLMNHLVSNNVKTVVFGHNKGQKQDINLGEITNQNFVNIPFTKLISMLSYKCLLAGINFVVNEESYTSLCSFVDGEEICKHEEYAGNRIERGLFRTSSGLLINADVNGSLNIGRKYLESIGEYSNKLHNELLNHMVNPKRRTIRI

SEQ ID NO: 1075 - protein, 389 aa, synthetic construct
  REGION 1..389: note = Synthetic
QLTETHQISRNHPFFDECDRLTFLSKNLWNATNYVVRQYYQKTGKHLSYNKVNKLFTDENQKDYRALPAKVSKGTQRMLEKAYSSFFSKRKKHLAGVEKPGYKHKTNGRQVIHYERGAISTKIKGYVKLSQTNILIKTDKNVDFVRIVPKLDFFVIEIGYKVPLPAPSATTGKGVAAIDLGMGNLLTVTSNVMQPIIISGKTVTHINKYSNRLLTQVKTKTVKSSHLTKAIYRKRRNKLKDYFHKTSRFLVDTWVNNNIKNVVVGYNTNWKFQNKIQNFSKVAYRTFLDILTYKCQLAGISIIEIEESYSSKASFYDLDPLPKVNAKKIPKFSGKRLKRGVYQTKNNLLVNADINGSLNILRKSKLWHSSMWQDCVVHSLEPVLKYHNE

SEQ ID NO: 1076 - protein, 409 aa, synthetic construct
  REGION 1..409: note = Synthetic
TEMTLVEQVHIKVSSPLFAECDRVCFLSKNLYNATLYAVNRYYEETGKHLSYKEVNRQFTHENQPDYRALPAKVSKHTQMLVEQAFQTYFALLKKKLKGAYEAKVNRPNYLKKKSGRQVVHYERGAISFEREGFIVLSGTSLSIPTVHGKEDIQFARVVPHGTHYVVEIGYKVALPKLSSSERVLAIDMGVNNLAACTTTEGEKFIISGRPLKSINQMWNKQMAQHRSRLEKNHGRKSSKLLRHRARKRNARVKDYIHKATKAIVRHAIFVGIGTIVLGYNAGWKQGTTLGKRNNQNFVQIPFNLFRETLAYKCALAGIRFVTTKESYTSKNSFVDGEYPRKREKYAGRRVKRGLFKTKEGLKINADINASFNIMRKFMEKEGTWNTCLQENLVGACSAPSVLRLDFSA

SEQ ID NO: 1077 - protein, 375 aa, synthetic construct
  REGION 1..375: note = Synthetic
MRQFFFKNHYFPSYASVNKEFTHFNQPDDRALPAKVAKHTQMQADEACRSFFSLNKKYKEGKLENKPSVPRYLHPKKGRNVVHYELMAISKRSLQKELIHLFRTDLYIPTKIDPSKVQFVRIVPKNGVIVVKVGYRETLPDLKQDCRRIAALDLGVNNLAVCSSNVMDPLVIDGKYLKSVNQRSNKALAASRSYEEKQHGRKNSPKIQAIFLRRNNRISDYLHKASRYLVNQFVFNQIDTVIIGHNPGWKQDTNIGKRNNQNFCQIPFNVFIRMLEYKCRMAGFQVILCEESYTSKCSFLDDEECRKQQTYKGKRIHRGLYKSQNGKLINADLNGSLNILKKGLLTLGQWNRSIYQQCLDRNEKAALIRYKVPRS

SEQ ID NO: 1078 - protein, 408 aa, synthetic construct
  REGION 1..408: note = Synthetic
SEQHIFARGSRAFQEFEKLCCNANNLYNATMYCVRQNFFAGKILTYPEVNQQFIKNKQADYYSLPTKISQQVQRNVVAAWRSYFSSIKDYRRNPSKYQGKPHIPGYRKRGGFYTVPFTIQSIAFNNRNVKKGFLKLSGTSVLIKTQQKEIQAARLVPLDRNHIEVEILYNAICHEKRNTGKIASIDLGVNNLATIVYPNSQTEIINGRPLKSINQFFNKKLAKVRSKNSQKGQQTRKEVNLISKRRNKINDYLHKASRYIVNQLVSNDVSELVIGYNAGWKQDTTMGKAGNQRFQSIPFYKFINMLTYKCELIGIAVTINEESYTSKCSFLDNEEICKHDEYKGKRIKRGLFKSSNGRLINADVNGALNILKKYLEEKAVRNKERILNSLDLIEVCSTPAVFTVKLIA

SEQ ID NO: 1079 - protein, 411 aa, synthetic construct
  REGION 1..411: note = Synthetic
VETQVIKKNDSRYKLLDDLCFHTKNLYNTALYEIRQYYFETKKYLNYYAVDKKFKQEKKKEYYALPVKVSQQVLRSVDKNFKSFFSALKSKKMVSKKKSIPKYLDKVKGRFIVTFTIQAISKRGLNKGIIKFSGIECELKTKVNPLCIDQVRIIPRNGYYKVEVVYTVQEKKQKEDNRRYAAIDLGVNNLATVSSNVVKPYIINGKPLKSINQYANKKVAQLQQEIDTTKNNNRKTNLKEQKYKLFHKRDNKINTYLHKASRFIVNRLVSNEIHTLIIGKNDNWKQETNIGKRNNQNFVEIPHSRFIIMLKYKCELEGINVVITEENYTSKCSFLDNEKICKHVNNEYAGKRIKRGLFRTATGKFINADLNGSLNILRKVIGEFQYLIEVCSTPRVETIFDTRKLIFHQIA

SEQ ID NO: 1080 - protein, 447 aa, synthetic construct
  REGION 1..447: note = Synthetic
YTVEKHQIKRSNPLWAELDTLSYRSKNLYNQALYRVRQCYFSTRKYLSYNELQKQLQNESQVDYIALNSKLSQLVLKGLNQDFLSYFAAIKDYKKNPSKYKAPPRIPNYIEKNGRHLVEFNIQTIGKKELRDKILKLSGTSSRIEIQKDIVTIAKMRKGKLINVLSLKSVKVIPFNDSYEVIITHEIPHKKEKPIDKDPNKCAGVDLGVNNLAAVTTNIKGVRPFIINGRPLKSINAYYNRMLAELKSKEDTTKSKRKKKRIRKEITKLTRKRNNKIDDYMHKSSTMLVNQLDSLGVSTLVIGRNEDWKQEINIGSRSNQNFCFIPHYGFIKKIQYKSDDKDISVKLNEESYTSKCSFLDFEDICKHEVYKGKRIKRGLFKSSEGLLINADVGGSGNTLRKGVTGAFDLWSRAEVIQGFVVNPICLTIDDLRNKEDLSKIVACHRRL

SEQ ID NO: 1081 - protein, 450 aa, synthetic construct
  REGION 1..450: note = Synthetic
TYCIANIDCIHPFYQKMDEYAFACKNIFNKTLYEYRQNFFYQEPLLTAFDMINYLSNKEKKDNVPAKVKQQTIKQVYESFKSSVGKSKLPRYLNKETGRANIILTNQAILKTRFTNENKIAFNYDDFCFEFNITNLTNKLELKFEHIKQVRVIYNSTYKKYKVLLYVEKEKSKKDSLEKEPKLSQVAAIDLGLNNLMALVFQNQRILFDGKPLKKINRRFNKNLAKLQSQRDKAINELKIVSDEIKTMEQDAIWFYELEADIDFDVKKYQKLMRRQNDLIKEIDKLKTKIGKLYEKRNNRINYCLHERSKKLIELLASNGIIKLVIGYNKNWKQDINLGKRTNQNFVQIPFYTLIEYIKYKAQEKNIEVITHGESYTSKCSFLDDEAICKHDIYAGRRIKRGLFRSKTGIEINADINAAYNIARKAGFNFKQFESLSPCSWAVVQSIQFN

SEQ ID NO: 1082 - protein, 293 aa, synthetic construct
  REGION 1..293: note = Synthetic
VIYKKAFRSYQVILIVNEKQKHAVKGEHAIAIDLGIDRIMSCVFKNHRVLFDGKQLKRINHRFNKNLAKLKSERDLLKNQWIKLQCQLEKMDYDAVLFYELNMEFDFNEEKYKKLIRKQSHIVNRLRKLEKIIARTYEKRNNRLKYCLHKLSRELIELCVSQGIIHIVVGYNKQWKQNINLGKRVNQNFVQIPFKQLLDYIQYKADEYDIKVTLREESYTSKCSFIDDEPIRKRKTYMGRRVKRGLFCSKNGIEIHADINAAYNIAKKAGYNFKSLYSLSPCSWAVVKRINFN

SEQ ID NO: 1083 - protein, 407 aa, synthetic construct
  REGION 1..407: note = Synthetic
KTHKIFVNPRHALFKALDNYAFLAKNLYNSTFYRHRQDYKDGKKKVGWMALNKEFRSTNQPDFRAIPSSMAALIVKAVDGEYESCFGRRKAGLKAKFPQYKHPIEGRYKLIFNEKLISKKALKRGYLKLTTPKSIKEELKFKLPKKIDYTTIKEVTVTKFNDGYMINIISKIEFIEFKVKEYNNVAAIDLGLKNLVACVSNNKMKPFLISGCPINSFNHFWNRKISKLKSKLDTSKDEGEKKALKDKINFSSRRRNFKVNDYLHKASHTLINHLDSNQINSLVIGYNQGWKQDINLGKKVNQKFCNLPFYKFLQMVTYKCEAKGITVKTQEESYTSKCSFLDNEEVCKHDSYLGKRVKRGLFRASNGSEINADINGAYNILVKAIGKFNYRPIQVCGLPSTLRVEFK

SEQ ID NO: 1084 - protein, 296 aa, synthetic construct
  REGION 1..296: note = Synthetic
LQKGILTLSSYFDTPLSFELGKLKNIINLDNIQEVKVVKIANGYDIKITYKTDKPTPKPNNGRYLAVDLGLNNLMTAVSNTNNTPFIVTGKTVKSVNQFFNKIKAKLQGEKDRFIHLAKQSNKIIPQISCINKQLNKLSFKRNNQINDYLHKASHYLINHAVANEITTIVIGHNQGWKQGINIGKRNNQSFVSVPFARLVQMIQYKAKLQGIDVIVTEESYTSKCSFLDDEPIAKQVNYQGKRVKRGLFKSSNNTLINADVNGAYNILRKVIGKFDYNPIVVCSTPKMINLLKVNP

SEQ ID NO: 1085 - protein, 419 aa, synthetic construct
  REGION 1..419: note = Synthetic
TASIHVKPTHPMYALLDEYAFLCKNLFNVATYHQRQAFFSNHQTFNAFTLINQFTKEKQPDYKAIPAKIAQQIVKQVAQNFQSFWASIKSYRQDKSKFKSNPKLPKYLHKTKGRANIILTKQAVSKRDWHKGILTLSSYFDTPLSFPLGKLQDMIPYEHVQEVKVVRIANGYDIRIAYKVVEPQQKPDNQRYLSVDLGLNNLLTVAGNTECKPFIITGKPVKSVNQYYHKSKSVLQSEKDKLSGKAIPQLTNLNRRMEQLSCFRKNQIHDYLHKASRYLVNHAVSNNISKIMIGYNQNWKQEINIGKVNNQHFVSIPFARLVSMIQYKAQLHGIEVILTEESYTSKCSFLDNESLKKQDSYLGKRVKRGLFRSSSGKTINADVNGAFNILRKVIGNFKFDPIVACSTPKKINVWQITSC

SEQ ID NO: 1086 - protein, 396 aa, synthetic construct
  REGION 1..396: note = Synthetic
LVEKHIINSSKELDILTFKCKNLYNKANYVIRQEFINNGKYINKLDMFTRLKDDFDYKELPSRVSRCVIRTLDANWRSFFETIKDYKQNKHKYKGKPNLPQYLNKSGKFNAIFIDSGILKPTKKNPDTIGLSSLKLRIKTKILYKDIVEVNIKPLKTDKYQINIVYKKLEEVLKKDNGNYCSIDLGLNNLMTLTSNKRGVNPLVINGRPLKSINQFYNKQKSLFQSELPKGIKSSKKIIKLSLKRELKINDYLHKSSHYLINYCLENELNTIIIGYNEGWKHEINIGKRNNQNFVNIPFEKLITMIEYKAKLSGLIVKKQEEAYTSKCSFLDLEPIKQQINYCGTRICRGLFKSQKGLINADVNGSYNILRKAVPNVFTNGIEGVAAHPKRIKSFK

SEQ ID NO: 1087 - protein, 408 aa, synthetic construct
  REGION 1..408: note = Synthetic
TEVQHIKRTDKRYKRLLQLCHLSKNMFNASLYIARQHAVQYDKDVKSGLDMTGKKKYLNYYDIWNLMKRNNPDYLALPCHTSQRIIKQVHQAFKSFFALMKLKEKGKYDKKVKWPKYMKKDGYNITVFDQIGNPSKEDGTIHLPTYKDLRFKIKCNNVNTITIVPKPGYIEVQFSYKKEEISLKEDNGNYMSIDLGVTNLASCFCNKEQSFIVDGKPLKHINRFFNKKYALEKSRIKEQHNIEFSKKTRHLLMKRFHKVKDYLHKASRYIINHAVSKNINTIVVSQAKGWKQEVSMGEENNQNFVQIPHEMFVNMLIYKGKLEGINVVRQNEAYTSLCSSLDNEEVKKHDKYIGKRIYRGLYRSTQHLINADINGAINSLRKYLKCNCEAVMPADVGFVYNPIKVSIL

SEQ ID NO: 1088 - protein, 409 aa, synthetic construct
  REGION 1..409: note = Synthetic
VRQSVIKRSSPAYTGVEHLCHLSKNLYNAALYTIKQKYESDGTYLNYYDINRIMCETNNPDYRALQNSQSQQTLKLVDQNYKSFFTSLKSKNVKHKVSPPKYLKKNGLYTVVCATNGFSQKKLRQGIINPGKTDIEIPFTGIDPDSIQQVKFVPRNGYIMMEVIYNVEDREPLPDNGNYMAIDLGVKNLATCTTTIDKPFIINGKGLCSINQYYNKEKSRIQSELEKKNGKKTSKRLQNLTNKRNRKIKDQLHKASRYIIDYAVSRHVNTIIVGKNDGWKQDVNIGEINNQNFVCISHTQFVNMLQYKAELAGIRVVLTEESYTSLCSFVDKETIRFHEIYAGKRAKTKTFITSSGMIMNADVNGSLNIMRKGLMKINASDDAAYHCKPVGRGFIVNPVKISDFTKFKE

SEQ ID NO: 1089 - protein, 418 aa, synthetic construct
  REGION 1..418: note = Synthetic
VESHIIKPSHKDYKELDNLLFLSKNLYNLGLYEVRQHFFKAKEDPSIKYKYLNYFALNALLKGREDENYRALPANVAQEVLKLINQNFCCFFKTLSLKRQKITTYPNRVSIPKYLDKEKGRQVLTYNGITISANWLKKGIIQLPKTKIQIKTKHPESLRQVRVVPKNNYIVIEVIYEIQEKELLKDNSRYLSIDLGINNLSTCSSNVISPFIIDGRRIKSINQFYNKHKAELQSSLKKNKRTSKRIQHLTNKRNFKILNYLHKASKFIVNQAVLHSLNTIVIGYNKGWKQETNLGKKTNQNFVQIPFEKLVQLISYKAKLQGIQVFLQEESYTSQVSFIEGDYIPTFGKDDLKKNPSGKRIKRGLYSSPKGLLNADVNGSLNILRKFLASNNEDFNSPVGKSHVDWPVRIKNPQRIKL

SEQ ID NO: 1090 - protein, 402 aa, synthetic construct
  REGION 1..402: note = Synthetic
TEKEIIYSTDERFDLIKELCHLSKNLYNASLYDVRQYYFGTKSYRTWQPQVPFFTKTKNPDYYALQSHVASEVIKQVGRQFISFFNNKSNQKKRIPKYKDKNGYNIITFNNLTISKQVEFDEVRQIYIYTLCKKSYNLKIQSTKPKVKMVKFVYDEENDLIKCFKIYEIEQPKLKKDNSRYFSIDPGLNNIVSIYNNIGIRPLLYNGRPIKSINQYYNKTNAKLRSELPSDVKSSKRLRQLSFKRNNKIDYEMHKISTHIINEAVQNNISKIFIGNNLGWKNGIKIGRRNNQNFVSIPYTKLFNQLLYKGLLNGIEVIFTEESYTSKASFFDKDKLPKYGESDNHKFSGRRIRRGLYKDSKGNIWNADLNGAANIMRKCSDKAYKGIRKTKELMKRPILITL

SEQ ID NO: 1091 - protein, 253 aa, synthetic construct
  REGION 1..253: note = Synthetic
VKFVYDEVNDLIKCFKIYEVEQPKLKKDNSRYFSIDPGLNNIVSIYNNIGIRPLLYNGRPIKSINQYYNKTNAKLKSELPSDVKSSKRLRQLSFKRNNKIDYEMHKISTHIINEAVKNNISKIFIGNNIGWKDEINIGRRNNQNFVNIPHTKLFNQLLYKGLLNGIEVIFTEESYTSKASFFDKDYLPKYGESDNHKFSGRRIKRGLYKDGKGNIWNADLNGAANIMRKCSDKAYKGIRKTKEMMKRPILVTL

SEQ ID NO: 1092 - protein, 403 aa, synthetic construct
  REGION 1..403: note = Synthetic
TEREIIYSTDERFDLIKNLCHLSKNLYNASLYDVRQYYFETKSYRTWQSQAPLFSKNKQPDYYALQSHLAQQVLMQVGRQFLSFFNNKSNKKKRIPKYKDKNGYNVITFNKVTISRQVDFDEDKQIYTYTLCKRSYNLKIQSTKPNVKMVKFVYDEANDLIKCFKIYEVEQPKLKRDNSRYFSIDPGLNNIVSIYNNIGIRPLLYNGRPIKSINQYYNKTNAKLKSELPTNVKSSKRLKQLSLKRNNKIDYEMHKISSHIINEAVKNNISKIIIGNNVGWKNEINIGRRNNQNFVNIPHTKLFNQLLYKGLLNGIEVIFTEESYTSKASFFDKDELPVYGENDNYKFSGKRITRGLYKDSKGNLWNADLNGGGNIMRKVSDKAAYKGIRKTKELMKRPILITL

SEQ ID NO: 1093 - protein, 402 aa, synthetic construct
  REGION 1..402: note = Synthetic
TESIIVKPTNPQYQRLLEFCHLAKNLYNASLYDVRQHYFETKKHKTWQTQRVEFVRNDNPDYRALPAKISGGVLKIVSKNYSSFFALRKKGLPARIPKYLKKDGVTTLPIPKDAISLDKHPSVNKNGDTIYTHVVSPRWLNIPIATTVAHPRFITVTPKYGYICIGVVYDTKDVPTLPDNGRYMGVDVGIDNLAACLDSDGNALLFKGKAIKSINQYFNKKRASLISQLSTRREVKTSARLERLSTKRKNKISWHMHNISSLIVNYAVSHEINTIIVGRNPQWKQSINIGRVNNQKFVSIPFSMLIQQIQYKAQEHGINVIVTEESYTSKCSLLDREDICKHEEYSGRRIKRGLFRSLDGTVINADINAAGNIMRKVVPVESLTQGIEVGAVQPQTVHYARS

SEQ ID NO: 1094 - protein, 413 aa, synthetic construct
  REGION 1..413: note = Synthetic
RIERALVHRSHPDFKKFDGLCFLAKNLYNSTVYDIRQVIFENRERRAEGKKLLKVPSHYDLVTLYAKNDDVDYRALPAKLAQEVVKNAHAGFKSFLGSLNSSKVKHKPSLPGYKHSVYGRSVVIFNKQMISKNITQIRDNLFEYTVMPKTLGWKFYSTKDNVKNIRIIPGTDHYAVEFVYSTPVVEPVKTGVVMGIDLGLRNVASLITSNGGAVLINGNPLKSVNQFYNKKLAELKSKLPKGVKTSHRINNLHCARNRKIDWEIHNISRFIVNHAVSTGVDTIIIGQNKHWKQGTNLGKVTNQNFVSIPYTKLINQVVYKAEDNGIKVIVTEESYTSLASALDNDALPVYRQKISHIQFSGKRRGGLYYRSNGSVLNADLNGAMNIARKVVPTINFKGIEGAVVRPSKVKTLR

SEQ ID NO: 1095 - protein, 427 aa, synthetic construct
  REGION 1..427: note = Synthetic
VERHQIDKKHPSFKECDFLSYISKNLYNSAIYHIRQFYFNNNTFLNPKVVNGKTINYWVFDKTQLYHELKDTKEFRTNEHPEYNGYSCNTKILKQTMIQVSRVFKGYKKALKTYSNNPSKFTGRPKLPTYKQKNGRNEVTVPKEAISFVKHKGYAKIANTDIFVKLVNVTEETTKEIKIVPRASHYEILVSYEAPEAQLKPQSGKLAGIDIGLNNLVALSSNDIAMKPSLINGRPLKSINQYYNKKAAKMKSLLPKDVFWSKALSQLTRKRNNKVQTEMHNISTYIVNELIKHNIDTLIVGNNKGMKQGIGIGRKNNQNFVSIPFHKLRRMLEYKCKKAGIHYIETEESYTSKCSFLDMEDMRKQSVYKGNRTHRGLFIDSNGNEINADLNGSLNIIRKVAGNAYFVYQNTSDLVEGYAVSPFKVTV

SEQ ID NO: 1096 - protein, 440 aa, synthetic construct
  REGION 1..440: note = Synthetic
VERNVYCASYSLPYSGNESLVNAMHKSKNLYNATLWYYRQALEDHRKAKEENRDPVTEYPDYYKMERKFRDERQINYFDLPQKVSQWVLKDVQSDWRAFAKLVVWKKSLPDSDPRKQQEISPPHYKYKDGHARLRYTKQAFSLKAVPGKIMPSGTDTALDIPKFVNPYRITQLVIEPEGDRHMRITFIYKVDMCDMLADNGKVAGADLGVNNLVTIGTNVGRGIIVDGKPLKSVNQWYNKRMAELRSLNGILYEKEINRKVETQRHRKTAKMERLSRNRRNWIRNYLHWASRRIIDFIASAGITTLVVGKNVGWKQECDMNKVNTQNFVQIPHARLIGMLSYKARQLGIACLTSEESYTSKCSFLDNEEMCHHDRYAGRRTKRGLFISASGKKINADLNAALNMIRKVIPNAFQAQGIEALVVAPVRLLWRTKLEIGAFH

SEQ ID NO: 1097 - protein, 433 aa, synthetic construct
  REGION 1..433: note = Synthetic
DESKKIHARKIQVKRGSQAEKELDYNMFLSKNLSNTCIYTQRSAFFAKRDCQDPKLKNEMKSFISKRELIKMLQDSNQADYRALPSIVAQQVCNQVCDEFISFFKKLKSGDKTARIPKYKDKVKGRNKLSYPKNAISTKELRNGYIKLTGINTKFKIPDGIDYKDIQRVDIVKKSSHIEVIVMYKVPKVELKEKNNRYMGADLGLNNLITIVSNVKGITPIIFDGRPIKAMNQFYNKSVSELQSKLTKKGKEKYTSNKIYSITRNRYNKINDYFHKISTYLINQAVSNGITAIFIGLNKEWKQEIKLGKENNQKFVQIPFDILIDMITYKAKDKGIDVITTEESHTSKCSFFDNEEMCHHDQYQGKRIKRGLFRTSDRKTINSDVNGALNIIRKVIPTFSCETAKLEVADVANPLRISFRNGNLFQASKRMCL

SEQ ID NO: 1098 - protein, 490 aa, synthetic construct
  REGION 1..490: note = Synthetic
KKDTLVETELVKKGSPLWGFCKEVTFVAASIRNRILYLFRQDFFESKKSGSGYSYSLSGYISEVARLYAEERKESVVDSNGNRVPPGKLVSNVGRSLTADVTSFRALMGLWYGENHGNLTGRPRIPNYSGARGKEKAYKAEFNNQMISELPCDKITKQGKRLYRYVIMPKTYNIEFYAVHQIKAVTVVKSGNGFKLLKMYDSEYVQSQDCLLYNLDLCEDNGNYLSIDLGVSNLITMVGISDREILPSYILSGQPLKSINRQCFRVVSKLNQYLDNTNKNRGKGVARQSKSTHRIKAAWSKRKRQSDAILHEYTSSVVNYAAEHGICRIYVGYNPKITQKASLGRKNNQMFVSMCWGQIISQLKYKAAKYGILVLACDESYTSKCSFLDNEYPRKHDAYLGSRVKRGLFRTAQGIRWNADVNAAWNILVKNNDNVSSNLDRNEVERFVVDPVVLIPSGFNRDKNDAASGKSGCGVTENRHELNLVPDHLS

SEQ ID NO: 1099 - protein, 452 aa, synthetic construct
  REGION 1..452: note = Synthetic
DGKYLVEKHCYSEKSGVFAEMYPVLLQAALLRNVVVFITRQHFFHFTGRNYTCDVFEDEKKKYLSYETVESYLKYVEQPEFRIMPANVAQAVVRSVMTEWNVYKKLLKKKLNGEYDGYVGIPRYSDTKHNATYVAKYFKATLSKKHLAENIINIPKTSISIKTKIDPKLIRSVNISYSCGQCLVNVVYENKERIPAKQDNGIYLAIDPGLDNFLTVVSNSDYFRPFIIDGKEIKSLNRYYNKKISTYTEMMNARDESFASDERTRMLWAERKNRLDDIMHIISAKLVEMARIINANTIVIGHNSRWKDRLPFRKDIKQNFAFIPFDSLYKKIEYKAAAYGITVVRQEESYTSKASFLDKDEIPTYCEHDKTLYEFSGKRIKRGLYRAGDGTVINADVNGACNILRKYLKVNSIDANISGECMGAVIPPVRIRISELRNRKRLLNKINSFNAI

SEQ ID NO: 1100 - protein, 422 aa, synthetic construct
  REGION 1..422: note = Synthetic
LVEQHVIDRKDPRYSVIDEAAFKSKNLYNAALYEVRQAFIHESKYLNYSEMDKRMQSHEAYKALPAKVSQQILMVLDRNWKSFFEALEAYQEDPSKFLRRPKLPKYKHKTEGRNILVYTIQALSKTGLKRGLIQPSMLAIEVQTKHKDIDQVRIVPRKGFYVVEVVYGKEVKQAEVNPAYYAGIDIGMNNLVALTSNKPGFVPVVVNGRPVKSTNQFYNKRKAELQKQLGHTGTTRRMERMTNKRNRRIDHYMHTASKRIVNLLVKEGIGVLVIGKNDAWKQEINLGKRTNQNFVQIPHARFIAMLTYKAELVGIRVQITEESYTSQASFLDGDPLPVRKSDDETKYTFSGKRVARGLYRASNGREINADVNGAYNIIRKVAPDAFQPAEGVEDGKGMLAFLVVHPVRVVIPRTKPKQASGQ

SEQ ID NO: 1101 - protein, 429 aa, synthetic construct
  REGION 1..429: note = Synthetic
LVEKYVIDRNDPRYAAIDEAAFKSKNLYNAGNYEIRQSYIFTGKYLNYNEMDRHMQSHEAYKALPAKVSQQVLMQLHHDWDAFFKARAAYREDPSKFKARPRIPGYKPKTEGRNMLVYTIQALSRGKKGLKRGMIKPSQLAIEVKTKQKDINQVRIVPRKGFYVVEAVYEQEEKQAPVNPAYYAGIDLGMNNLVALTSNKPGFRSVLVNGRPVKSVNQFYNKRKAELQSQLRRKGTTKRMERMTSRRNRRIDHYMHTVSKRIIDLLVKEGIGTLCIGKNDAWKQEANMGKRTNQNFVSIPHARFIAMLTYKAELVGITVKVTEESYTSKASLLDLDPLPVRNNGNEKHIFSGKRIKRGLYRAKDGRKINADINGSGNIIRKVAPDAFSEAEGVEDGKAVLASLVVHPVRLVVTPSRTQKGKSRAKASNQ

SEQ ID NO: 1102 - protein, 351 aa, synthetic construct
  REGION 1..351: note = Synthetic
VEQHCISKDDPRYAIIDVAAFKSKNQATFTGRPKLPGYKHKTEGRNLLIYTVQALRGGQSKKGLPPGRIQPSGLPVEVKTQQDPKTIDQVRIVPRKGYYVVEVIYSKEPVQASVDPSVCVAIDVGVTNLAAITSNCAGFIPRLVNGRPLKAINQWYNKRMKELTVCLPKAERERVTKQMRRITTHRNWQVNHYLHAASKRIIDLLVQEGIGTLIIGKNPFWKQEASMGRRNNQNFVQIPHARFIDMLTYKAALVGIQVEIQEESYTSKASFLDWDPIPTYKPDDEEKHIFSGKRIGRRNRLYRTQGGRVICADVNGSYNILRKRKPDAFVHANAKGVAAYVVQPLRLAIAV

SEQ ID NO: 1103 - protein, 444 aa, synthetic construct
  REGION 1..444: note = Synthetic
LVERHIIKISHQFYKEVDELAWRSKNLYNYANYLVRQSFIKDSTYLNNVAVFHLVKKHESYTALPAKVSNQVLMVLHRNWKSFFESQKAYRQNPANFNGRPKLPKYKDKLKGRNIVIYELGAISKKGLNQFAIRNSQFAITFCDGDLDPDTKRAAYLAGDLNPQSSLKEGVIRLSKSAIELKTFVDDVKEVRLIPRCGQYIIEVVYELEETPQQLNPFLVAGIDIGLDNLAALTSNKLGFNPVLVNGRPLKSINQQYNKVKAKLQSHLKGNAKTSIRLNALTCKRNNRIDNYLHNASRWIINHLVGEKIGTLVIGKNHQWKQEINLGTKTNQNFVSIPHSRFIEQLQYKAELVGITVLINEESYTSASSFLDLDPIPVYKKGEKHTFSGKRIKRAWYRSSNGKLIHADINASLNITRKVVPATYSLGIEDIAVYPFRVTPGKVA

SEQ ID NO: 1104 - protein, 269 aa, synthetic construct
  REGION 1..269: note = Synthetic
VPKCDSYVIEVIYNACTQPEPTVENQKELVASIDLGLNNLVALTSNQPGFVPLLINGRPLKSINQFYNKRKAQLQSQLKGNRCSSSRLGRLTRCRHQKVDNYLHHTSRQIINLLASEKIGTLVIGKNQKWKNEINLGKKTNQNFVSISHARLIEMLKYKASLVGIKVIEQEESYTSKSDFFSLDPIPVYGNIGSGDVTFSGSRIKRGLYKTSSGRLINADVNGSYNILRKAIPNAFSDGIGRGRSSAEAGQSAQSERERGGPGASHVMS

SEQ ID NO: 1105 - protein, 411 aa, synthetic construct
  REGION 1..411: note = Synthetic
TLVKLVERHIIKKGHRFWDEIDELSWHSKNLYNAANYLIRQNFIYGHGYLNYNRMDKLMQKTEQYRALPAKVSQQVLRGLDKNWQSFFAANQAYKVNKEKFLVNPKIPKYKNSQKGRQLLVYVKQALSKVALKKGKIKCSKTQIELETSVAEKVVEVRIVPRCDCYIIEVIYEEVEPTLKSNEWVASVDLGVDVLMAVTSNQPDFVPLLINGRPLKSLNQFYNKRKAFLQSQLKGNRPTSKRIQRLTRCRNQKVENYLHRASRYLVNLLVNRNITTLVIGKNEGWKQNAKMGKVNNQNFVGIPFNRLIEMLTHKCQLVGIKVVLTEESYTSQSNFFNLDPLPVYGETVEIPKFTGKRIKRGLYRTDTGFLCQADILGSYNILRKAFPNAFMGYGIERCVVHPRRINLSKPK

SEQ ID NO: 1106 - protein, 414 aa, synthetic construct
  REGION 1..414: note = Synthetic
VERHYIDRQHQFFKQFDNLSFLSINLYNHGNYYMRKHFFKSGYQVGCARSFKNLYAILKPTADYKSLPDQISYQVLKQVFHYGDAWKKSIMAYCRDIHQFSSSPNIQKDKPKTCGRNLLIYDNQLIGERGEHKNNGLLDLSQGDIIIITKAQDLIEVRIVSATAIYVVEVVYEKPVRLVDLNPQLIAGIDLEIDNLVALTSNQLTFTPTLSDGKYVPLINQCFNKRRAFLQSKIDQGKYTARQIQQITFKRNKRVKNYLPKTSSLIVKGLVDEKIGQLVIGKNVAWKQNLALAQKTHQTFVVISYAKLREMISYKAELVGIKVTVTEESYTSKCSFWDLEPVGKQESYQRKRVKRGLFRSLNQTLINPDVHPALNMIRKINGNSPFEECSNCIEVFAVSPVRVEPVRKEPQKVR

SEQ ID NO: 1107 - protein, 441 aa, synthetic construct
  REGION 1..441: note = Synthetic
VCDELAFKSKNLYNLANYYCRQHFFRSSKSLDLTKLYHATKDSDAYRSLPTKVSKQIIKCLVATWRGYFQAIKEWSKHPGKFLGKPKIPKYKDKTKGRNVVIYSKESVYKAPLKDGICHLSMSDIKIPVVVETVIEVRIVPATSCYIIEVVYEKTLQPQIHSTSVAGIDLGIDRLVALSTNKPGVKPMLVNGKPLKSVNQLYNKRKAKYQSHLKGNRKTSRKIEALTYHRNRFVENYLHNTSKLVVNYLVTNNIGTVVIGKNENWKQCADIGKKNNQNFTQIPHSKLIQQITYKCQLAGIKVIETEESYTSKTSALDLELPCQQENYVGKRVKRGLFRSATGKVINADINGSICDNQKEIPRGFYCRGNSELCRERLYWLIQYQDKSSDRFSTVFFVRSHRSLDRRSHGEESALIRAAPLLAQLCEAQTPGSDRACAQRYN

SEQ ID NO: 1108 - protein, 398 aa, synthetic construct
  REGION 1..398: note = Synthetic
VDRHIINRTHQYWRVCDELAFKSKHLYNLANYYCRQHFFKCSKSLDLTKLYHATKDSDAYRALPTKVSKQIIKCLVATWRGYFQAIKEWSKHPQRFLGKPKIPKYKDKTKGRNVVIYSNESVYKRRLKEGICHLSMSDIKIPVVVESVVEVRIVPATGCYVIEVVYEKTQQQHIESTYVAGIDLGIDRLVALATNKPGVKPLLVNGKPLKSVNQLYNKRKAKYQSVIKGQKKTSRKIEALTYHRNRFVENYLHNTSFLVVEYLTTNNIGTVVIGKNDHWKQGANIGKKNNQNFTQIPHYKLIQQITYKCQLAGVKVIETEESYTSKTSAIDLEEPICHENYLGKRVKRGLFRSATGKVINADINGSLQIIRKKFPGAFTAEGIVSCAVQPVLVNPISR

SEQ ID NO: 1109 - protein, 282 aa, synthetic construct
  REGION 1..282: note = Synthetic
FTRKALKTGICHLSMSEIKIPTSQTEIIEARIVPKSSCYIIEIVYEKEEEITKNQQVAGVDLGVNNLMAVTTNQTGASPLLIKGRPLKAINTFYNKQRSCLQSQLKTNDNQNNSPKLKKLTHQRNCRVENYLHTASKRVIDWCVNHEIGILIIGQNQNWKQEIKLEKNNNQQFVKIPHYRLIEMLTYKAKLIGIKVIITEESYTSQSSCLDGDNLPKYGEKKPKFSVKRVTIGLYKTRENKLLNADVNGSLNIIKKVIPDVLDQGIKGLAFNPIVVDPLAFN

SEQ ID NO: 1110 - protein, 420 aa, synthetic construct
  REGION 1..420: note = Synthetic
VERHIITKSPPCWSEIDHYAFLSKNLFNLANYHYRQYFFENSQKLSFNQLYHLVSKTSDYLALPTKPKHADNQKIGAAWVSYFAAFKAWKKQPEKFLGKPKIIKYKDKTKGRNLLIYSQESIYKKPLKEDPPNPPDVGGARGGCHLSMSDLKIPTSKREIIAVRIVPKSSCYVIEIVCERRSETTDKQQIAGVDLGVNNLMAVTTNKTGVAPLLINGRPLKAINTFYNKQRSKQQAQLKTRNNQSLSKGLILLTHKRNCRGENYLHTASKRVIDWCIFHQIGTLIIGHNERMKQSLNLGKRNNQQFVNIPHYRLIEMLTYKAQLKGIKVIITEESSTSQSSALDRDELTKYGEEKPLFKGKRLARGLDKMETNQLLNADVNGAFNIIRKVIPDVIDQGIKGLPFNPVVLDPLRMTKLSGF

SEQ ID NO: 1111 - protein, 433 aa, synthetic construct
  REGION 1..433: note = Synthetic
TVMNKTITLQSVKPNNLIYRECEDLCVISKQLYNVGLYELRQALFNNNEFLNYKVLYQEMKNNENWTALPRKISNKVWMQVTGSWSHWLKSLKEYKNTPSKFTGRPRLPKYNKSLNIVTYEQGALGTKGLPENQIRLSKTNIILDTSLIGGQVKEVKIIPKNSHFLIKVTYTEEMRNNDLDYSKIAGIDLGLNNLVTVATNQADIQPRMVNGRPLKSINRRWNKQKTKLQSKLKKDIFNSHQIKKLTEKRNHQVDTYLHIASRMLVNWLVKNNIGTLIIGKNLQWKTGIKIGKRNNQNFVQIPHTRLIELVKYKFEQENGIVVVNEESYTSKASALDLDEIPTFSKRRNQKYDFSGKRVKRGLYKTLQGLLINADLNGALNIIIKVAKNSLDDLVSDKQFIHHCATPKFFYMWHTNEITKSHFFCNCKICPTK

SEQ ID NO: 1112 - protein, 390 aa, synthetic construct
  REGION 1..390: note = Synthetic
VERHFINEKHKDFKEIDDLAFRSKNLYNYALYTIRQHYFQTRFYINYNELNKQLQSHEAYKALPSKVSQQVLIKLHKNWLSYFEALKAYKIDPSKFYAKPKIPRYKDKIKGRNLLTYNNQAIGKNNKQLSKTNITINTTKIVQEVRIVPKTFGYYIEVVYNTEEAKQFRKNKKFASIDIGVNNLVAITSNSAKALLVNGRPLKSINQHFNKQMSNPKLGEKRRHMLCAKRYHRIQNYLHNTSCLIIKYCLKHNIRTLVVGHNEGIKQELKLRKDSKQNFVYIPFLDLIKQIDYKGAINGIKVIKTEEAHTSKASYYDKDPLPKFDVPVEYSGSRVKRGLYKSKDGTALNADLNGSLNIGRKVIHDYVVDRSLVARPVKVNPLRTDYCSLL

SEQ ID NO: 1113 - protein, 407 aa, synthetic construct
  REGION 1..407: note = Synthetic
VERQFIKGTPEIEEICFKAARLFNRCNFLMRQEHFAGRRVFGISQLWEMLSKEQVFQQLHNTKTAMQTIRRCLTDWSNFFKSLKVWNKDKTKFLRCPKPPGYKKKMGQVIFFNETIKRKPLKQGLLVPTNLLFSIKSKHCNDFKQVIITPKTFGFVIEVSFEAPKEPKKLKQPGTCAIDLGVNNLCAMTSDQHDPVLIRGGIPKSINQWFNKNRSKKRSRKRYWRLENFFHHTSKFIIENCQANGIGTIIIGRNQGWKQKTKFRRKSKTSQNFQSIPFFKLIEKIQFKAEQQGIKVVFTEEAWTSQASFIDSDPIPVFDKDQPKPQMSGTRFKGLFKTDSGAVLNADVNGSLNIARKVIPKIVEDDRWSRSVSATPVVVNPLKWFHLEKGSMESGLMARTSECFATF

SEQ ID NO: 1114 - protein, 399 aa, synthetic construct
  REGION 1..399: note = Synthetic
LTEQIIIPTEYFNEIDNISFLSKNLFNASLYEIRQHFFQTEKFIGYCNLDKLMKNNPDYVALPRKISQQVLQQVCKSFISFFRALGSYKKNPEKFLGRPGICHYLEKKEGRNLLIYTDQAFSRVKIKENIISPSGTNLEIKIRDHIKKINQVRIVPKQTESIYIMEVIYEIEPDNLDLDKNRKIGIDLGVNNLLAITSDKQGMTPILVNGRPIKSINQWFNKTRSFYQTLGMTDCKKLRKLSRKRRLKIRHYFHNVSRRLIDYCIHNNIGTIIIGKNDFWKQEVNLKSRTNQNFVSIPFNNLIEMIKYKAELVGIDVIETEESYTSKTSFIDLESMEYHENYNGYRKNRGMFKSTKSQREINADINGSYNIIRKVFPETFGEGIEGFVVIPKVWKFSHF

SEQ ID NO: 1115 - protein, 406 aa, synthetic construct
  REGION 1..406: note = Synthetic
TEQHVLKGKHWQEADQLCFASKNLFNRGLYSVRQHFFETDKFLNYNSLDKQLQKEESYRALPAKVAQGVLRQIDRGFRSFFGTLQKFNAEPHLFAGRPKIPKYKEKQKGRNCLIYSNQAISKKALEKGMIKLSKTSIQVKTKAKQVQEVRLVPKPTGEIILEVVFVRGPQDLHLNKNNRLSIDLGVNNLCAMTSDKPEFQPILVKGGAAKSINQWFNKKKAEMQSLLEEGRKSSKSIHRLIRKRNRKIKHLFHQVSKFVVESCKANDIGTIVIGRNKQWKQKLNIGKSNNQNFTALPFFQLIQQISYKAELAGIEVIEVNEAYTSKCSALDLESVEHHENYLGRRIKRGLFKTAEGILVNSDVNGSLNILRKAFPKAFADGTEAVEQNSQEWRSFVVQPKSAIFAA

SEQ ID NO: 1116 - protein, 409 aa, synthetic construct
  REGION 1..409: note = Synthetic
LTSITKIKRGHEAFKAIDTYCLLSKKLRNKVLWLQREEWNNNKGYISFSKMLKNLAANDDVDYRALPAQVSQQTVMDVDDDFQSFFTRKERGEKCNAPSFSPKGEKGRFKVTFTNQSISLPSFRNGFIKPSGIDFEFPIPKYIPLKDIKDIREVRFTPKQHYYQMEIVYRVPTCEYQDTGNYAAVDIGISNFLTIVSNCSSPLLIKGGKFISTNSFWIKKRSKSQSKLKKGFYSSNKIKWLDEKRNNKIRNDINCLTNQLVSYFIGLQVSDVYIGWNTGIKHGINIGKSNNQKFVYLPHKRVIDNLSYKCERFGIKVHTANEAYTSKCSFIDDEEIGKHETYLGKRVTTKFFVSKEDKKINADVNAAYNILKLSRGIKFIELDPRQVFGTPRVLKVNYGLNRKRPSHEL

SEQ ID NO: 1117 - protein, 288 aa, synthetic construct
  REGION 1..288: note = Synthetic
NNQAVSQIAFKKGRERPSLTDIYLPAKVSKISEIIIVTKLGLYIRKLVGANRADPKITQGGNCAAIDIGLNNLATLANFLASLRPQIFDGRALKPVNQYANQRNAELRAKLPEGVKISKKRLWLWENQNRKMAWLIPQTSSAIVKERVKNSVSQLAIRYSPEWKDEIGIGTASPHKLVSVPHHKFAGQLQDKCAVKGIEVLLAERGRTCKCSSCDREPVQKQENGLGVRSQRGLFRSGAGGLINAGVNAAYNRGSKVFGNGKSPSSDRGSGSCASKGKTLQTGKSGQK

SEQ ID NO: 1118 - protein, 399 aa, synthetic construct
  REGION 1..399: note = Synthetic
TETTVIKPSQQALYRACDEICFLSKNLYNKTLFIQRQNYRDGKPYIGYFDMLTLMRKEKHPEFYALTSYAADYVVKQLDANHRSFFALCKLKKAGKHQGKVRPPQYKDKIHGRNLTTFYKGSLVKRTYQREGLIHLSRTDIKFKSKIPLELIQEVKVVPKLGCYELHVVYHAHEEEKIENSNYAAIDLGLNNLATVATNVSSPFIINGRPLKSINQRWNKTKAKLQSKLKKGARKSKRIYTITNKRNRRVQNYLHQASRALVNELRRLSISKVIIGSNKEWKQGINLGKRTNQNFVQIPHYRFIQMIIYKAALAGIEVIAKEESYTSKCSFLDDESIEKHDEYAGRRVKRGLFKSMNGKLINADVNAAYNIMKKHLGIGPKDLDSVQVLSAPNILMFGS

SEQ ID NO: 1119 - protein, 411 aa, synthetic construct
  REGION 1..411: note = Synthetic
CSVNLVEKHIIRKGHKWFGACDRVCFLCKNLYNYVLFENRKKFIETGKIYSMKEFFKMLRTNNQPDFRALPSQVAKEVVRLHYKNWLSFFAAVKSHRKNPSKFTGRPRLPKYKKQKGDTKYGRFIACYYFPEAISRKALKQGIIKLSGIDNLSRPLGIEIDSRGRKVKMVRIVPKYGRYVIEVVYEVPTPNLQAANGKEAALDLGVNNLGTVVFNTGDHPVIINGRPLKSINQYFNKLKAQLMSYVGGKGHSQRLEKLTLNRDNKIHDFLHKHSTLLMNYLASKGITKLYVGKNQGWKQSIKIGKRNNQNFVNIPFDKFIQMLTYKGALRGIEVICHEESYTSKCSCLDRESVKKHLIYKGKRIKRGMFKSNKGILINADVNAAYNIGRKSNPEFLDRIEVLPLVPRRLIA

SEQ ID NO: 1120 - protein, 429 aa, synthetic construct
  REGION 1..429: note = Synthetic
VEQHIIKSSHKWFAYCDEITNISRQLYNSAQYTQRQSFFYGHSTLTLAQLDRLFQRDQNYSLLPAKVAQLVLAQCADAWASYFAALKAYRMDSVKFTGKPKLPGYVDSRNIVKFNNQAISKREFKKGKIVPSMSSICIPIKDGLKFEDLCEVRIVSKTGCYVVEVVYEKPAPAQFFCSLNPELAAAIDIGLDNLATVVFSDPTISPLAINGKPLKSVNGFYNKQVAKYRGFIKTGTSRHLQNIVRNRNNFVDSYLHQTTRLLVSEFLALGVTKVAIGKNTQWKTSINLGKQTNQKFVQVPHARFIEILTYKLNDVGIEVVVGEESYTSKASFLDWDTIPTYTPGRTEKPVFSGKRVHRSWYVASDGSKIHADVNGAFNIGRKVISKSFACLQDIVLRDRGCLVVHPRRITPAFPSLLGKAQVLLKAKLG

SEQ ID NO: 1121 - protein, 318 aa, synthetic construct
  REGION 1..318: note = Synthetic
RAPSYIDGELNIVKFNYQAIGKKEFKNGCIAPSMSPIKIPVKPGLKFEDLREVRIIPKTGCFVIEIVYNVPDSTEFFCSLNPELAASIDIGLDNLATIVFSDPTIQPIAINGKPLKSANQLYNKQVARFRGFLPAGIGTSRRIQNVVRNRNDFVDSYLHSSTKMIVDELLKNGVTLVAIGKNEQWKTSLNIGKRNNQNFTQIPHAKFIEMLTYKLEKVGITVKVGEESYTSKASLIDWDIIPTFDPHHKIKHTFSGKRTQRAWYISKDGLKIHADVNGAFNIARKVIPNSFNCLQEIVGRDRGCLVVHPLAFNTFVLS

SEQ ID NO: 1122 - protein, 414 aa, synthetic construct
  REGION 1..414: note = Synthetic
ASKDLWNHANNIVLSVFTASTESKKNGDAEHATYLNYNAINRMMIDRCDPTYTALPRKVSNQTLMLLDKAWRGFFASMRSWKRDPSKFLGMPRMPGFRSHKRGGQTVTYEFGAISKKRLKKGFVSPSGTSIEVPFVHGAEEGVRLLGCRIVPLGDGEYKLDILYERTWEDKVEGRSVHAAIDLGVDNLATVVFDDGSRPAIVSGRTIKSENRFWNKQRAALLAALQASDARRRSSKRMRLIDAKHGRRMESMLHEASRCLVDELVFRGASDLIIGYNKNWKQDADMGSKNNQKFVGIPHERFVSMVEYKCELSGIRTRRQEESYTSKASFLDLDPMPTFADDCAAPKFSGYRSERAWYKRKGHEQKVHADVNGAYNILRKVIPAAFVKGISGFAVSPARLRSCERHGNGFPLVC

SEQ ID NO: 1123 - protein, 421 aa, synthetic construct
  REGION 1..421: note = Synthetic
VERHVITRTHPVFREIDRASFASKGLYNKTLYITREMFETTGKVCGYNKLDKIMQTHDVYHSLPAKVAQKVVKQVSEAWKAFFVAIREYKKCPEKFCGKPEPPKYKRKNGRNLVQYTNQAIHKGTSSRKQIIHPADLQPITTTKQNPDKIQQVRIVPRSSHYIVDVVYEVNDPPAENAELDYSLYAAVDIGIDNLATIVFNRPGMTPFAISGRELKSINQFYNKRKAYFKSMLPAGRHTSRRIEAMGDKRYWRVQDYFHKATRFIVDELVRLKVGNLVIGKNREWKQEVNIGRKNNQNFCSIPHDRFIWMLTYKAEAVGIKVTCQEEAYTSKTSFLDNEPICAHEKYLGRRIKRGLFRSDTGTLINADCNGAYNVLRKFAPEAIQVSIASVSYVLHPVRITFNQLNMKKVDPNPSRDDVRE

SEQ ID NO: 1124 - protein, 439 aa, synthetic construct
  REGION 1..439: note = Synthetic
LVEKHVINKSHKYWLECDQLCLDSNKIRNQGLYIQRQSWFYGHGVIQFGKTELHKNIDALMKQTACYHNLPAFLAQQVMKSVNEEWTSFFNAIKQWKLDKSGFSGRPKPPKYKPRNTGRYKVTYPQTRAYKKAKINGIIHPYKTDIRIQSKHSHDYDCVRIIPATGCYVIEVVYTVKQEKYAVNTDNNYIAAIDLGINNLAAVTTNKPGFQPILINGRPIKSINNRYNKFISKLRSINKKLHGLHWSNRMELMTRRRNHQIDSYLHRASRLLIKILTCQGINTLVIGLNPDWKRNCNMGKRTNQKFVSLPHKKFVDMLTYKGLLVGIKVCIREESYTSKSSFLELDDIPELGNKPRSWKPNGTRIKRGLYRSKSGLINADVNASYNILRKEFPDAFSQGIKGCVVQPRSVNVPGYKHKPSYCRIACKFPRLCVILTQTK

SEQ ID NO: 1125 - protein, 419 aa, synthetic construct
  REGION 1..419: note = Synthetic
LVERHIIKQNNKWFREIDQMSFLSKNLFNCAVYLCRQAFFKNQPIPTLNQIYHSLKNSDDYKALPSKVAQLVFKQVDKCFKSYQKTKKEYDLNPGKFLGEPKLPKYKHSSKGRNILAFNNQAFSKKALKKGLISPSGLSVFIKTKLAEIEEIRIIPKNNVYIIEAVYEQEEPPVVTNNRIAAIDIGLNNLATVSSNCLDFKTFIVCGKAIKSCNQFYNKVKASLQSQLPKNQKAQSQSAGRQRSELCKRTSRKIEALTLKRNNKVDYYLHTASRFIVNHLASQNITHLIIGKNENWKQSINLGSKNNQNFTSIPHARFIQQIEYKAQLVGIKVQISEESYTSKCSFLDLEPIKKHEQYLGRRIKRGLFRSNSGKIYSADLNGSLNILRKVVGDSIFDRNSIERLVVSPVRLTPYQARNI

SEQ ID NO: 1126 - protein, 408 aa, synthetic construct
  REGION 1..408: note = Synthetic
LVERHIIKQNHIRFREIDKMSFFSKNLFNCAVYLCRQAFFSGQPIPTFNQIYHSLKNTDDYQALPSKVAQLVFKQVDKCFKSYQEAKKEYQLNPDKFLCEPKLPKYKHKLRGRNVLTFNNQAVSKKALKQGLISPSGLPISIKTKLTQIEEVRIIPKNNVYILEAVYEQEETTPEVNNRIAAIDIGLNNLATVSSNCLDFQPFIVCGQAIKSCNQFYNKVKASLQSQLPKNQKAQSQRTSRKIEALTLKRNNKVDYYLHTASRFIINQLVSQNITHLIIGKNENWKQNINLGSKTNQNFTNIPHARFIQQLEYKAKLVGIKVQIAEESYTSKCSFLDFEPIKKHEQYLGKRVKRGLFKSQSGKHYSADLNGSLNILRKVVGDSIFDRNSVERLVVSPVRCKPYQARNI

SEQ ID NO: 1127 - protein, 406 aa, synthetic construct
  REGION 1..406: note = Synthetic
VERHLIRQGHRYYQECDQLCWLSKNLYNSATYIYRQNFFKGVMTNAIEVYHQLKTGVDYKALPSKVAQGTLRLVLRNWTSYEQAKKSYLKNSSLFKGEPKIPHYKGTRKKNRSDGRFIVTYNHQAISKKLLKKQIANPSGTKIFLPTKVTAIDEIRIVPRTGCYVIEIIYPTEETTTKYENERVASIDLGLNNLATLTYNIPKLKPCIYDGRAIKAANQYANKLNALLRSQLPILEFTSKKLEKLWMKRNCKVDYYLHTTSRAIVNDLVKNNIGVLVVGWNEGFKDGINIGRVNNQSFVSIPHKKLIEQLQYKAKLAGIEVVLVNEAYTSKCSALDNEPIQKHKKYLGKRIKRGLFKTANEKTINADINGSLNIYRLYQQVAGNALAHPVEGVVVHPLRVKPYKVS

SEQ ID NO: 1128 - protein, 413 aa, synthetic construct
  REGION 1..413: note = Synthetic
LVEKHIIKKSDSRYKILDEHAFLSKNLYNASLYAIQEHYKQTQSFLNYNALCKKFQDDNNPDYRALNSKIGQWVLKQACTAYESYFKALRDYQKHPHKYKACPRPPFYKPKIRGRNVLICTIQTIGRKKFAEKTLALLGGLVELRTQILPTFQPKKEDQPEKSNIAQVRIVPRKGAYHLEVVYEKCPEKYDLDVNKVAGIDLGVTNLATVAFNDNTIKPFYINGRPLQQINHYYHKLKAQLQTALPTGRHTSHKIQQLTLKRNNKIKDYLHKASKKIISYLIQNQIGTLVVGYNPLWKQNVNLGSLFNLKFTQIPFAEFLHQLKYKAELAGIVVKVQEESYTSKCSFLDGEKIAKQTAYKGKRIKRGLFKSAKGLLIHADLNGAYNIIKKAIPSAFAKGIQGVVVHPYRDKIL

SEQ ID NO: 1129 - protein, 254 aa, synthetic construct
  REGION 1..254: note = Synthetic
VVYTTQAISKRQLKQGIINPSKTGIYIKTLVPTSQIKQVRLIPRLNHYVIEVIYEKCEKQYELEKNRCASIDIGLNNLATLTFNQAGIKPLLINGRPLKSINQYYNKVKSFLQSQLQENQSSLRLKKLMLKREFKINDYLHKSSRLIINTLINHKIGTLIIGHNEEWKQKISLGKRNISYFVCVPYNKLIEMLSYKAKMVGIDVIITEESYTSKASFIDNDLIPVYKEGEKNKVTFSGKRIKRGMQSYRQQKIN

SEQ ID NO: 1130 - protein, 448 aa, synthetic construct
  REGION 1..448: note = Synthetic
EISQEVVSDEVQAQVNDEKKPREDFKVASIIIPECNVLLDMMHESMLYYDQALFFQRNEYFKTNNRKEGKYGPYKIYTANELDKMLRNCLRTDIRYSEKERKMHNRGISYITRQVVSQWKGWRSAVKDYKKEPEKYKAMPEMPKYMHRRKKYNVLRLDDHAYGWVSENKIRLAKTDCIIDLPSHLNSSNVRMIVMQKYYNKIKINVVYVDKEEKINNAVDEGSAMGIDLGVNNFCAITINDKDNSYIIKGGGVKSLNQLYNKNMADIKSKLEKCNKRKVSKKINSECMHRNRRMYEFIHTVANKIIDLALENRVGSIVIGHNPGWKQDINLGKVNNQKFVSIPFNDLINALQYKVEKYANLKLIVTEENHTSKCDHLAKEEVCHHDTYKGKRKTRGLFVSSIGKIINADINGAIGILRKVHAFTDAQLMRLRDRGDIVSPKVFRIINF

SEQ ID NO: 1131 - protein, 459 aa, synthetic construct
  REGION 1..459: note = Synthetic
KHEQRVFKQTVEYDEVLDRMLRDSVSIYDQTLYYYRLEYFRCRDLNWTELPKYPSCFDAMNLVKIRDAFINSKMDINIKQQCITQASEAWTGYIRSKKKYKEHPKEFTDEPQMPRYKYRKQVYNVITVNKTRFRGSSDKYIKLPCTDYNVRIPDGLKKEWIDQLKISHRYGKFHIVFIYNYELKREFERQQRKEKTVQLNPKESLGIDLGQKLFVAGMTYGCDNEQSFIIRGSEIKQLIKDTNDSIARLTSAALISKNPEITKISKKNGQLKLSKNSRHLSGIWEHYNNSSDNFVHCTSNMIIDFCTENCIGNIVIGHNEFWKQNSNIGKKNNGIFCKLPHTELIEELKYKCKSAGIRLIEVEESYTSKCDHLANEDMCHHDTYLGKRKGRLYYSSTGKRLHSDINGCIGMLRKANVIQDASCLLDRGDIVSPVVLNIRGYQPRKQRSPKKTDIIDNTL

SEQ ID NO: 1132 - protein, 419 aa, synthetic construct
  REGION 1..419: note = Synthetic
KTWSMIVKNDDRLLKMMSDSLSIYDQALYYQRRAYFETKEQGKIKTHSYVDLWKLVKDTPVYRDSKLDVVSKTLSIKQVSNSWTAFIKATMSYRKSPSKFLGRPKMPNYLYKTKEYNLVQVDKARFRKINKDENSFNLPCSDYRIKIPKQIKLEDIRQITIQKYFGKIKINIIYEDSKVIRNDYDKNSAIGIDLGVNNLCAITSNDKSFSYIVKGGPLKSINQFYNKRLAELKSQLEMKNKKKTSKQIQRLTLKRNNKIDHYLHCCSKQLIELCVDNKIEKIIIGHNDGWKQEVDFKSRDIETKKRNTQNFVQIPFNKLIEQIKYKSLKYTDLEVEIIEESYTSKVDHLALEEMKHHEKYLGKRVERGKFKSSTGKILNADINGAIGILRKGKAISDEQLMFLRNRGDVVSPRVFKLNL

SEQ ID NO: 1133 - protein, 408 aa, synthetic construct
  REGION 1..408: note = Synthetic
AEKMILRKTPEVAKWLEEVTAIYNQGLYYYRQELFQARKENRKPDYSKIKLYDILKDMDCWKLATVDHPSKTAALRKVKDNWTSFYRACKAYWKDKGKFTGMPKPPKYLKNGKTAPLVFDKSRLHHRDFENHTLCFPKSKRRITIPKHVDMGKIRCITVVSYYGKVKLFISYDKETTASRLNRDNCVGIDIGVDNIVAITANNQKKSWIVKGGCVKSINQFYNKETARLKSILETVNKTKTSKRLQRMYMKRNQKLDYELHCISRKVIDLCLENDIGRIIIGHNNGWKQNSSLGRNTNQKFVQIPFNDLIWKIQYKAEENGIECVVVEESYTSKTDHMCGEEMVHHDSYSGKRIQRGLFRSSCGRVLNADVNGAIGILRKANALPDGGVAALRNRGDVVSPVVLKYKP

SEQ ID NO: 1134 - protein, 394 aa, synthetic construct
  REGION 1..394: note = Synthetic
MNQELKKFILESKLIYNQSLYFLRQAYFGCKKNSIKIVTPSYIDLYKLVKSTESFSTSCLDYVVKQGVIKQAYTSWKSFIRATIEFNKAPNKFLSRPKLPNYLKKDNNLITIDSTRLRTTGCKINEIRLPNSAFKFVLPRYITRSKIKCLRILKNYQKLKIEIIYEKEQNLKNYNNSHTIGIDIGLNNLAAITSNELNFSMLINGRPLKSINQFYNKMLGDLKSKGATKKIDKLSHKRKMKVDNYLHWASRQVISICLANGVSKIVIGKNDSWKQGINLGKRTNQNFVMIPFAKFIQMIQYKAGEVGIDVKLTEESYTSKIDHLAHEGLHKQEHYLGKRTKRGLFKSSTGRVLNADINGAIGILRKVNEITDVHLMNLRNRGDAVSPKLLNKAA

SEQ ID NO: 1135 - protein, 409 aa, synthetic construct
  REGION 1..409: note = Synthetic
RVYQITVKRDDRLDRIMFDSARIYNQALYFLRQNYFGAIKNGTAFKTISYTQLYHLVKVCDCYKVATEVHIKQAAIRQAFDMWKAFIAASKSFKTDPSRFTGRPKPPKYIKTAYFKAEVDKQFLNKRNLSAYQFRLPKTDYTVSLPPNIKRDDVRCVRIVPFFDKIKIEICYLKDTTALKLDFNSAISADIGVNNLMSITSNNQCFSSMIVNGRPIKSINQFFNKIRAKIVSCLEICNSCKTSKRLQRLSRKRDLKIKDYMHKASRFVVNQCVANNIGTIVIGHNVGWKQDVNIGAKNNQNFVSIPFNTLINMIKYKAEDVGIKVIITEESYTSKTDHLICEAMKHVDNRPNKRIRRGLFKSDYNRRLINADINGAIGILRKAKVVTDRDIVSLRDRGDLSSPRVFTFK

SEQ ID NO: 1136 - protein, 502 aa, synthetic construct
  REGION 1..502: note = Synthetic
RVKIFQIRKGSDEYAMLSGLCDITTKIYNNALFVLRQLHFASYPDKHDAQYYLDRIPDIFKKYVVANKKVVKSKNEEDREITVYSLRFTSETGVDYSYDRAMWRILESNEDRGVFGRCQLHTARNAVRKAHLEYKSYLALVKRYRDGYLEDEPHLPRYKKEGRRSSFIADSFRRTKTGGIIINNMVLLKTVFVRDIEGDIKQVRIIPVEAQNIYKVEVVYENTIDGNIVVGDKSLAIDIGIDNLCAITTDGGDAVLINGKPLKNINKFYNELVADICSTYSFQQIKSGRKRRMYNLKRNNKIDTYMHQVSRWIVEYAKSNGCGTIYIGHNNGWKHGVNLGRKNNQKFVQIPFNRLIERIRYKAEEYGIRTELVNEAYTSKCSAIDSEQICKHSSYCGRRGGRHNKEFVTGKGKLLNADVNGSLNILRLGTKKDVSSIGDIMFSPPKVKGIGMKGYEMKPQNHSAKLNGMFSDGQVIGSPIKVEATVDSHCDELSPYKKASAF

SEQ ID NO: 1137 - protein, 447 aa, synthetic construct
  REGION 1..447: note = Synthetic
EEGIRVETHQIKEGHPFYNWAVQECSLNTSLYNRTLYILRQAFTGKHDNIPEYADLIKKERFISKFDLISRMLRLNDSDFRALLKAQEAVQTVKKCAESFSTWFKSLNAYKKNPKKFTGKPRMPRYKKEANSDKLFSVAFTYMDARIQKDGTINIRRDFKLPIKTKLATLQELRLVPKQGCIEIQIFYKANFLKTDLDYNKAAGIDIGIDNLMAVTSNEGFISHLVNGRPLKAINQFYNKTKAEIVSKLAERNADTSKRLRKLTLRRNNKIKDYMHKASRSVVDLMAENKIGNCFIGHNDGWKQEVNIGKRNNQNFVSIPHSQLIWMMEYKAKEAGINVETHNESHTSKCSFLDNEDICHHDEYMGKRKKRGLFVSSVGCMLNADINGAANILRRGLNKTFQPHRIMFNPVKIDIEKKHPMLVSDQGVEGEGFTHCLSNPNTLSLTA

SEQ ID NO: 1138 - protein, 560 aa, synthetic construct
  REGION 1..560: note = Synthetic
TEMHQVQNIRIPYSETLSKFCKLSKNLRSRAVFLGRQLYFLRTNKLNYNLAKQYPKLAEQLLDYMETKLDSPELYEELRQKLYINPTMQISRKLFSKLNKFEYSEGLNTFLKFEDCFKNLGAIYSQLPTQVLRNVASDWKSYRENHKNWKIYPELYKEEPRIPSKNRKTDEFLLTFSGTYVNNRKYASTIVDRFINTRRPTRNSKRLKKQLSKYCTSGELILPNEFLKKFSKLDPFPIVRTTIDIESIKEVKIVPKKIFYEIQIGYYAQKLQNNSLNPLRAYTIDIGVNDLIGLANNFGEQSIIIRGRPIKAINQWMNKNISKLRSAQTIGMTMKKGVSVPETSEMTRIRRKRDAVIDDYFHKVSRFVINCCLSRRAKNLAIGYNAGWKKDLTSREEKKMRYDVKQNFAYLPFYKLIKMIEYKAELVGINVVRIGESHTSKCSSIDFEPIEHHDKYIGRRGVYRKGPNKPSRIAMGKPKLKYYKARGLFKTRDPITGKPIIMHSDINASFNIGRKAFPDLFNKNTLKIRDMVKPPRTVCVYKYEYSEKKKRSVKHSCAMV

SEQ ID NO: 1139 - protein, 285 aa, synthetic construct
  REGION 1..285: note = Synthetic
VRIVPKKSCYEVQIVYKIPKTLKNLDNKRGYSIDIGVNELIALTNNFGEQSILVRGRPVKAINQWMNKKISILRSVQTKGMTFKNGYEVPETKEMTRIRRKRDNVVNNYFHKTSRYVIERCLNSRAKNLSIGYNSGWKKDLLNTEDKKMGFKQRQNFAYIPYLKLIQMVQYKAELVGINVSIIRESHTSKCSAVDFELIDHHNEYMGIRGVPRRGRNKKKSIKNGESEFKTYQTRGLFRTKDGYLIHSDVNASYNIGRRAFPELFNEHTLSKKDMLKSPISVQIV

SEQ ID NO: 1140 - protein, 395 aa, synthetic construct
  REGION 1..395: note = Synthetic
VYKIQIKENDYLKDITTMSNNLYNVALYNVRQHFFNHKTYLNYFNNYPICKENENYKGMPSQAAQQVLKQVDNSFKSFFQALKDYKKYPNKYKTCPKIPRYKEKGSKSVVTIPSQTIYRKDNYIQFPKTKFKVFLGELKIDKIIEVKIKPYNKYYEICITYEQEDLKRVEKNENYIGIDLGVNNFITVSNNIGKRPFIVKGGIIKNMNQYYNKKKAMLMSFIGDKGVSNRIHKLSRKRNNKIMFYLHNVSRHLINYCINNNVSNIIIGYNKEWKQEVNTGKRNNQNFVSIPFNTFINQIKYKADEVGITVILNEESYTSKCDALALEDLKHKEQYFGSRVKRGLFKSRTKEILNADVNGSLNILRKVIGNDFVSLLNRGLVKNPFIVKYDKEFVY

SEQ ID NO: 1141 - protein, 406 aa, synthetic construct
  REGION 1..406: note = Synthetic
IEQHIIDKSHELWKECDRLCFASKNLYNYSLYKIKEYQENNNNKLPSGYDLYHIVKKEQCFKVLPNDSAKQTVFQAVDMWKNFYKAIKSFKKKKDAFTGCPKPPKYKNKTKGRNVLTIPIRNCRLKDGYILFNKNLNLKLKTKVDNLKEVKVVPQSGCYLIQVCYEQESLPSVTTDRKIAIDLGVNNLMTISNNFNDKPLIINGKPLKSVNQYYNKKKADLQSKLPKYVDNKGEVKQRTYSNKIESLTNKRNNKVKWLLHNYSKYLIDYCKQQGVSQIAIGYNEGWKQDINIGKKNNQTFTNIPFRVLINQIQYKAELQGITVLLHEESYTSKCSALDLEPICKHDEYKGRRVKRGLFKTATEKFINADLNGSLNIGRKVFGDDYIKFDTGCVVHPVKVTPLQRVK

SEQ ID NO: 1142 - protein, 436 aa, synthetic construct
  REGION 1..436: note = Synthetic
KMIQLAKRFRIKSIPEVEVLCRISKDLYNQSLYELKKKGEEEGVWMRHFDLREHMKEITNLEGNVNYRLLRDAIADCVIKQVCNEKDSFFAAIKKWKIHPEEFKAKPEFPHFLGRNSMNLLQIRYKHDCIIDIHGNITLHGIPNVKIPIPQWGQYKQQILEGCKQIRILPFKGYMTVEVIYKTKIHPADVTKDRVAAIDFGIDNLATVVTPKGCYIFSGKVLKSYNQNFNKKLAHYTSIKSKQGIEKGTKRMTAMYDKRNRYIDTFMHTTSRAIVDMLIEQKIGKLVVGRNKGWKQEVNIGKKNNQKFVQIPFYMLQSQLEYKCVMAGIEYVEQEEGHTSKCDALAMEEIGHHEHYAGVRKKRGLFLSSTGRYINADQNGALNILRKNIGDKEYKEKTKDWQMNSPVRIKHPQMRNEICNPSNGQQIQRRSSVSSQ

SEQ ID NO: 1143 - protein, 416 aa, synthetic construct
  REGION 1..416: note = Synthetic
YKFYTRHTEQLDALLKVSNNLWNQALYVFLQRLNSDGTWLWYNDMDKIMKQTLNLNGECNYRLLKAQCSQQILRTLDKSIKAYCKSIKDWKKHPEKYKAMPRMPSYRKRGGMFNLFYTKQCASIKDGQIRLTKDLLIAIPQWEKYGEQVSKFNQIRLIPECDKVKVEVVYDKKLAASDVDKNKYASIDLGIDNLATMITSDGCIIWSGKHLKSYNRCFNKRLSKLQSIKDLQGIKRSTKRIKALYNKRDKYFEDVFHKVSRQIVDVLVEKKVGTLAVGYNVGWKQNTDMGKRNNQKFVQLPFARLTSYLSYKCKLAGIDFIEHEESYTSKCDALALEEVCKHENYLGKRVKRGLFRSSVGKIINAEQNGALNILRKVVGDSEFARIIGSGHSLCPVRHCNPFTWDVRGTNSKVLKK

SEQ ID NO: 1144 - protein, 403 aa, synthetic construct
  REGION 1..403: note = Synthetic
VYSFEVNKDSCSCFGFLKQGCRVQKDLYNQALYTWHIHREELNEYIHFKDFDKLMKTVENLEGEINYRLGKTQVAQQTLRRLDTSISSFFKAIKKWKENPAKFSGRPGFPKYLRKKGYTQMTFTNQSISIKEREDGTGYILVDRHHILDIPNYSDYKHLFKNFNQIRFIPSKNCEYIKVEIVYTVDDEFYHNTELDYSRFASCDLGLVNLMTIVTDFCEPIIFSGKEVKSYNNFFNKHLAKAKSDVKLINKHNSSNRIRTLYHKRDNYLNDIFQKTTTALVQLLIDNHIGNFTVGYNKEWKQNQKKDKKLKKKTRQQFQHVPYAKLLHMLKYKCERAGIIFKEVNESHTSKCDALAFEEIEHHETYLGKRVKRGLYKSSTGQVINADVNGALNIMRRSINDSS

SEQ ID NO: 1145 - protein, 420 aa, synthetic construct
  REGION 1..420: note = Synthetic
VYKFNIRCDIETRRKLLEWCKVSKNLYNQALFTYKRELKEHQVYLSYFDLDKAMKITTNLEGEINYKLLKAQVAQQCLRGLSANTSSYFNAIKEWKQRPDKFNGMPKLPNYVKSKTRQLVFTNQACTIKDGKIFFERNASIKIPQYEKYAESFKAFNQVRVLPKYDGEVLECEIVYTTNETNSEVDSMRFASIDLGVDNLATMVTDYSNPIIYNGKAVKSINQFWNKQTANLKSEIKKSQNKGTSKKLTKLNNKRNARINDIFHKVSRDIVNNLLANNVGNLVVGYNKGWKDSIELGNKNNQTFVQIPFARLISFLEYKCRKVGINFILNEEAYTSKCDSLALEKICKHDEYAGKRIKRGLFQSSTNKLINADVNGAFNIMRKVVDDSYANKIVNSGLLFNPSKVKIFEKRTYSKIIQVA

SEQ ID NO: 1146 - protein, 417 aa, synthetic construct
  REGION 1..417: note = Synthetic
AYKFYYRKKFPELDTLCIVSNDLYNQANYIVKEEFKKSGKWLRYNDLDKVLKTTENLNHEINYRKLKAQVAQQVLRILDKNWTSFFNSLKAYKKNPKDFKGLPKSPGFRKTKDRNLLVYTNQSCQIKDNNRITLEENIELSIPKTDIDFSKFQQIRVLPRKRRYEIEIVYNKDCVNFELDQENYLTTDLGVDNFAACVSKEGSFLLDGKSIKSVNQYFNKMKAKNQAYRDKKGKNVCHKKSYELSNYRGMFTRDQFHKMTRFLINYCILKNIGTIVCGYNKQWKDSIDIGKINNQKFVCMPHKLFLKILKYKCELVGIVLICKEESYTSKCDSLALEPVKKQKKYLGKRVKRGLFQSSMGKLINADVNGALNTLRKVIGDCLFIKGIIDSVVLFNPVKIRFADLSCEQTLSNFLVRC

SEQ ID NO: 1147 - protein, 524 aa, synthetic construct
  REGION 1..524: note = Synthetic
YQDVVMSYYINNTDRNRLLFQFLKPLSEVSVHIYNQCLYFAKLMYNNNQAMPSIETIDHNCRYAEAPFDYYKQIQALASDDFAGKTIRLHYTPIQSFVGLKETDKELNGTPQLPRYKNTQEDPTRSFATRVRLNDKKGETIRSMIKEKQLGNKSYYYLQILKTKNIWIPIPKCCQTEELLISKGMKEFQINFIPISCMKYKIQILYRKPIQESCLDRSRMLFIDLGTRNFATCITNDPSLYPVILNGNELLNLNRYLVNSQNTHSRICQIQQKIDTLIDAGTISENIVPSKTRIVKDIREYRKRVIREIFLKYKNFLLTYCQRHNIGTIVIGENKGWKQNTKQTKGQDGNRKFGKTATREFQNIPYDQFKFQLEYSAKILGIQYIASPEAYTSQVDHLAQESLEFHPSSKVEGMKRNYIMRNNGQEIILKNGKKKTNNKLFISKSGIVINADVNGAMGIGRKYCLENNIPEPDFNQHVQTRSLFTPIRIKYHQLNQPKTQFNWNQFHISTQNSTSLTPIASPIK

SEQ ID NO: 1148 - protein, 437 aa, synthetic construct
  REGION 1..437: note = Synthetic
SYNFIFHKHENVKLFHHLKDQMFWSARLYNQVLQIHNEMYWNCSVSYNYEMMEKLVKQLVVNNYFYKLKSGVAQQVIKAFYHDLNSYLQSVKEYQINPKKFNGVPRPPHYKKRYNDCVYTYACIVLRDGKIYPKEDLGIEIPQDQYKKFECFYTRDQNKKVFVHKNIKTVQFKFLSKDKIQVFITYKTDELNSELDKNNAIGIDLGFRDLMSVVSKDKSFIYSGAPITGLNRECNIIFDKLKSFKDSHKRIFRCNSNKLKELYLKRSFKINTYLHQCAKHLVNYCVSHKVGTIVVGYNEGWKESISRKNLTIKCKSVAHTLNRRFNEIPFYKLIRILKYLCQRIGIKLVTLHESFTSKCSALHLEKICKHETYQGVRDGGQFKSDLGFLNADINGAINILRRYLKDNDFIKNLISSKHIFNPKILKVAEICCKQQYC

SEQ ID NO: 1149 - protein, 416 aa, synthetic construct
  REGION 1..416: note = Synthetic
CACFYIDKTEWFEEQFLYSRHLYNQGRYVINNHYKEHKNFISQTELNRILRNYEPEFNNYRNLCKAKLSQMILIHLCNNYKSYFQSVKDYKVNPSKYKGEPRLPKYKDSLNPLYFDYQSVKIRDGFIVITKDVKVHIPTNVYRDEFKSFKTVNFIPKGRKIKVVISYETAEIRSDLDADKYLSIDFGMNNLCACISEDGCFLINGRPLKSINQIYNKKSSELKERRPKIDKKYQDKRVNRIKLESLSLNRELRINSYLHNCTTYIVNFCIEHKIGTIVLGRNKNWKDSISLSKTVNQNFVGIPFYKLMNMLAYKCKRMGINFVLQEEAYTSKCDALAFESIEKHESYKGSRIKRGLFKSSVGKLINADINGALNILRKFLNSTKETSEFSVLQKIIGSGLVFRPVRITGNGIEAKL

SEQ ID NO: 1150 - protein, 492 aa, synthetic construct
  REGION 1..492: note = Synthetic
LTANFNFYRRPENEEVYDWLVEACTVAKNLYNQTLYYAYEFKKAYDPVRDQYKKDTGKVFPWFPEEYVGYDAPVDDFFKVMCLRRYASEQDESGDYYTKNLEGKSNWELLKNLVGRDATSEVLRTMLAKNLKSYGKSLGDWSRHPEKYKGMPKKPGFYKSDELCPLYFSGATIKIDTKTCSIIFPKPRGTDGDRKAIYIPLQKLPHNSSYKSGKKIDQVRIIPKKGYFKVEIIYTYDEAIPLRDNGRYLSIDLGVKNFCTMITSDKNLNPVILDGNAVKTLNRYCHLVVDKLKHKIEVVTDKDGKKRSKQYTTKRIDAITKNNNNRITAIIEFYTKYIVRYCLHYNICRVICGWNKDMKQKINIGHKNNQMIVNFPFKKLLDKLEYKCKMRGISFEIVEESYTSKTDHLRNAPLATKEDPQTRDEANFGKRIHRGLFLSDTGKLVNADVNGAMGIMRKAIPDFSWVGYHPFYPVRMKVKDVVEGLKYSKFPK

SEQ ID NO: 1151 - protein, 478 aa, synthetic construct
  REGION 1..478: note = Synthetic
CRSFYITKKQYPNVFPQLLELCHLGKNLYNQMLYYWYRWYDVYEKSLSFFDFCWMFKRIQKPFDNYRKIQKIMGTKTSDYSLQMYNGSIQSYFKGLKEFYKNPHKFKRKPNSPRYIKQYYFYFVTGISKCDENGLIRFLPMKNKDLQIQIPKHQWFEEMRKDTKSNNKIYRKIKQTRFYYVKKNIIRIEIIYEKEEKPLMEKNDNVIGIDLGVNNLAAIVSNKISPILIDGRVIKSVNHKYNKESSLYKSKLKKCSIYKNESGNYINGDKSNHLDNLIFKRNNKIKSLMHKFSSYIIDLCIENNITTIIVGKNKGWKNKSNMGKRNNQNFVQIPFDKFISMIEYKSKLQGIKFIETEESYTSKTDNMMLEYLYKYLGKDNKYNEFPPKDYKFIGKRPKRGYFISSNGKLINADINAGIGILRKKLGDGIVKDIINPYNPKKLTIQDIEKVVPNSVKGEGDTSSNQGLLRFMNKINTKS

SEQ ID NO: 1152 - protein, 457 aa, synthetic construct
  REGION 1..457: note = Synthetic
VYSFRIDQNDKVIYSTLKEMSKISKDLYNQALFEVKKNYEEIGEILSYSQLDKIIKTKKNLEDNINYHLLPAKVAQQTLMLVEQNIQSFFKAKADYKEHPEKYLACPQFPNFLDKNGHFVLVFTNQQAKITEDGKIQLTRDVAIHIPEEEFSKYQQYFLKKEGFRIVPKFNQVRIVPKFNAQFFNIEIIYDKSELSLDLDIERVASLDIGVNNLITLVDNYMDEEDRKPIIINGKPIKSINQFYNKKRAEILSKLSQTNQRSSKELSTLQNPTLFSSVLIKVRFCNVLREITDWRNEKINDYMHKASRFVINHCKAFNIGHIVIGKNDGWKQEINIGSRNNQNFVFIPFNRLIQQIQYKAKLVGIEVTTTEEGYTSKCSALDLETIGKHEDHAYAGKRVKRGLFRTALGILINADVNGALNILRKVIGDIFLKPFIEKVARLIPSRGYLCYPSKVYF

SEQ ID NO: 1153 - protein, 436 aa, synthetic construct
  REGION 1..436: note = Synthetic
RTYRFVIDRHDKPYQKLKYCTRVCKDIYNQSLFILRRELEENNNLISKFDLPKVIREIKNLEGELNYRKIPAKSSEKVVQLASQTVKSYFKALKDWKKNPSKYRGKPKFPNFLPKNGYQVMSIYGSSLSIKGNVIQFGKKTFGQPVQISIPEKEYLKYRHLWYKDIQRSITNRSDLSNRLIKMVRIIPTSSADYFSVEIVYDKAQLLAPVDQEKAVGIDLGIDNLITMVPNFKQEILIVNGRPLKAINQWFNKKNAEVSSRINKAGHRNTREKRDLYTKRRHKVYDYMHKGSRVVIDWCVKHKVSKIVIGVNKGWKQNVNIGKVNNQKFVSIPFSTLISNLEYKAEEYGVEVVTVTESYTSKCSALDLEPIQKHETYLGRRVHRGLFRTAEGVELNADVNGALNILRKEIGDQFIVDAKGSGSNYLIDNPIRINLN

SEQ ID NO: 1154 - protein, 264 aa, synthetic construct
  REGION 1..264: note = Synthetic
ANKDLTEKKILRNRRVYKRKVEKAELNYSSYLSIDFGLNNLITTVENRNEKPIIVSGRVLKSINRQWNKQKARLNSIKDKQNLKRTNRLESITINRNSVITDYLHKTAQFLIGYCLENQIGHICLGNLKNIKQNIRMGKRNNQNFVNIPIQKLKQMITYKAQLVGIQIHEVNESYTSKCSSLDLEPIQKRKNYVGKRTKRGLFRGSNYLLNADVNGALNILRKVVGDGFIQNLSDRGCWFQPVRIRDVFQTSHEQFLLKCYTTT

SEQ ID NO: 1155 - protein, 433 aa, synthetic construct
  REGION 1..433: note = Synthetic
YKFRYPRSKHLDLLAHISKNLYNEANYIVRQEFFANGIWIRYYQLNMLLKASSRNYKLLKAQTSQQILKVVDKNWALFFKAIKDWKQHPEKYKGRPRIPRYQDKDGYFMLIFTNQNSKIINNNCELVITMSRSFKDAYPQCKEPLRIAIPHYPNKDFSSSYQQVRILSRRKYFEIEIVYHEKEVANPNLDKDCYLAIDLGVNNLVTAVENRNVKPFIISGRLLKSVNQFWNKKKTKLQSVKDKQQHRYTHQLDDITTNRNSLVYDYLHKAARFIIQYCLANGIGNICVGELKHIKDGVNLGKKNNQNFVNIPLQKFKQLIMYKASLAGIKTHELNEAYTSKCSALDLEAIKKHKKYLGRRITRGLFRGSHYLLNADVNGALNILRKVIGDDFIRKLVDRGCWFQPVRIRDLIHTSHQQFVNTTGATGATCVPC

SEQ ID NO: 1156 - protein, 426 aa, synthetic construct
  REGION 1..426: note = Synthetic
TYQFRIKEDSKIIEFMKISKELYNMALYEIRQSFIKEHKYLNYYDIEKLMKTKPNLDNKILYKLLPAQTSQQILKVLDRNWKSYFALSKKYKENVYHNQKPNIPSYIRKNENILIFTNQNLTLKNNRLKNKKFNINIKIPQKDIISNFQQFRIVKKNNILFGEIVYEKKININPNTDKNKVMAIDLGLNNIAALTDNIGNSPILINGKGLKSYNQLYNKKRSKLKTIVTNGKNVKNVNDKKYFKSTKRMIKLDNNRFFYFKNFLHHVSKNIINICLYRKIGTICVGESKGIKTSSRLGKHNNQHFVQCPIQQLKEMIKYKAEMEGINVICTEESYTSKCDSLSSEPLKNNKTFIGKRIFRGLFASPKGLINADVNGSINIHRKVFGDNFGIQSLVNSRILFNPIKIRNPQDSNSFKQFLLKGINKC

SEQ ID NO: 1157 - protein, 613 aa, synthetic construct
  REGION 1..613: note = Synthetic
FCKLFYNQMLYLPRLIIDAEYYKYELENISKEGKRDDRFERYIAYCIKLDNGEFDEKEKDEKRFAKYNTDRNLWKGLYWIWAKELQRMFYQHQLKSKKEKIGKWNEEHPQMIGELLVVKKGETISFRDTIEKLKVGDIMPFLDKMARHYQDKWTGNHLLENRPDLLKDWTGTIENAEKFNWFEANPWNKRVTESIIKAIRTDFSNTFKSFSAWKKNPESFLGRPGFPNFKRDYYMTFSVDNRDCEIVRGKAGLDIVIKIRSGTKILKNGKKRNIYDRFVTIPVPEMYNDLFLEGRFTDVKFAPLNHKYFDISIGYERRNDFTFLNGKRSVLVVIPNPSLDYGRYLGIDFGDRIICGCVTNFENKPFLLDSSKIHEINEWKKVARARVQSKHDKRMHPNGTRKGDKPPYRQINAIEQKRKRVIDTELHAISNCIVQFCVRNKIGNIVYGYSKDWKQNTKKKAKEKTAKKGKESAGGFYYKDVRRRHADIPHSKLIHQITYKAQANGINMIAQEEGYTSMCSAFDKEPIEWHKKYLGMRGNGKNGLPRALFRTATGIVVHSDINGATNILRLVIGDSFLDSEEFRTPINPTKTTDPHNPNPSIASSLQRDRTQLA

SEQ ID NO: 1158 - protein, 299 aa, synthetic construct
  REGION 1..299: note = Synthetic
LLTEIALPLPEFIDSDWVKEVTVRPCYGQLWIDWVIEDGKQIVEINPHLDYTQAWSFDHGGNNWLTGVSTLGQSLIIDGRKLRSMNQDYCRIVAKYKQGKSDFYWDSNLDRIQRKRNNQMRDAINKAARFIINRCLADGVGNIIIGWNEGQKNGSDMGKRGNQNFVPIPTGRLIERLKQLVCEYGIVLTITEEAYTSCASFLDGDLLPKYGEKPEGYKPSGNRITRGTYKTKNGKIIQADCNAAANIMKKVATQLGLVLVKVGRAVLSLPHRYDLFRDLKNSFRNKLRSAALAHRVTTM

SEQ ID NO: 1159 - protein, 475 aa, synthetic construct
  REGION 1..475: note = Synthetic
MYKTIPVRATFLEEEKAFWLFQCEQANSLWNCAVYYSKQKHYSWLEQQPEAFTTYWRGDELRYGWKTYKCALKYPELCKELKSNPHYKAMAAQSAQQSLKTVAESIASYNQLVGLYYKGQVDKPKLLRYRKKGGLAPVTFPRQPLKYKNGLFYPPISKESKAELLTEIALEPPDFIDPDWVKEVTVRPYLGQLWIDWVIDDGKQPIEKNPNLDYSQAWSFDHGGDNWLTGVSTHGKSLIIDGRKLKSLNQGYARLVAKYKAGKPEFYWDANLDSPKATLRERVQRKRNNQIRDAINKAARFIVNRCLNDSAQPTLRERIGNLIIGWNEGQKNSLNMGKRGNQNFVVIPTKRLIERLKQLAFEYGIKLTITEEAYTSKASYLDDDSLPKHGEKPKGWTPSGKRVRRGLYKTSKGWLVNADCNGAANIARKVATQLGLNLAKVGREFLTVPHRYDIFKSLKKSYRKRSGEARFQPAL

SEQ ID NO: 1160 - protein, 487 aa, synthetic construct
  REGION 1..487: note = Synthetic
TIPVNGNFNDWENDYWADQCRNANSLINCAIYYVKQKHYAALAEMDNSRSLYWRGDELRNGWKTYQCKDISYAKLCADLKENPHYKALAAQAAQQTLKSVGESITSYNGLVRAYYKGEVNRPRLLRYRKAGGLAAVTFPAQALAYKDGRVYPSVSKETKPHLIDQISFCLPEFIDFDWVKEVTIRPNLGEFWIDWVIDDGKQPITHNPNLDYSQAWSYDHGGSNWLTGISTQGKSLIVNGRKLRSMNQGYCRLIAKYKQGKSDFYWDANLDRVQRKRNNQMRDAINKAARFIVSRCLDDGIGNLIIGWNDGQKQRSKMSKRSNQNFVLIPTGRLIERLKQFCPEYGIVLTITEESYTSKASFLDNDSLPRYGEKPKNWKPSGTRVKRGLYKTGSCFLINADCNGAANIARKVAAQLDLDLTKVVRGALTLPQRYDLFNDLTKSYRKRCLSRTLSEKLTIVEDVSHSQQLRSPDSIRRSNISLESPVF

SEQ ID NO: 1161 - protein, 470 aa, synthetic construct
  REGION 1..470: note = Synthetic
VYKTVPIKAKFTDEEKAFWVDQCEHSNSLYNSAIYLARQNHYAMLLERKANTTYWCGDELRSGWKTYRLETNYYHLDKQLKTCIHYFSLAAQAAQQTLKLVGESITSYNKLVDKYYLGDGSRPSIPKYRKSGGLFAVTFPKQALACHNGYIYPSISKATKPELITSIKLILPEFISFDWIKEVIIRPSRGEFWVDWVIDDGKQPIINNKSLNYNHAISIDHGVKFWLSAVTTLGKSFIVESPQLKTALHKYRNQVQQHKKNKPSRYWDNYLDRITAKRNLQVRDAVNKAARFIINKCLKDGIGNLVIGWNEGNKTNINIGRNNNYEVVSMPTKRLIERLRQLCEEYGIRFHITTEEYTSKASFIDNDELHQYGAKPIEWKPSGKRISRDVYRTKDGLLIHADLNAASNILRKVADQIFINSGIAKLAFEIIKRGALTHPKRYDIFSNLKRSYRKQTMSRSMSLDYGVTTA

SEQ ID NO: 1162 - protein, 460 aa, synthetic construct
  REGION 1..460: note = Synthetic
PNYQTQKILLSGNVSDETESYLIWACHLSNNLSNSTLFSVRQAHFARCPRREFFDKNDFYRSEFKDRYVSVSYAQLCKDFKFNHNYIGLGGQQAQQCIKSVVESIQSYNQLLKKYWQKEIDIKPKLPNYRKSGGLNQVTFPSQAVTYNKYEGYCSLAISNEARPNLEIKKLIIPSGVDFKPEQLVEVRITPSNGKLWAEYVYKSDKKQANDLDYSQAIGLDPGVNNWLTGVSTLGKSFILCGKKIKSINQKYNKLVAKYKKGKSNFSWDSFLANLTHKRNCQRRDVVNKAARFIINYCLVNKIGNIVFGWGKEIKQNSNLGKINNQNFVAIPTARLKKRIKELAEAIGIKFIETEEAYTSKSDYLAEDCLFKFGEKPEQYRFSVRRITRGNYRSKFGIICADALGAINIIKKVAIQLGISLVEVGRESLIVPKRYDLFSNLKKLYRKRSEMVLRLSRSNA

SEQ ID NO: 1163 - protein, 473 aa, synthetic construct
  REGION 1..473: note = Synthetic
DKVFGTIQVRLNVSDEVLAYLTYQCQQSNSLSNCTIFQVRQDHFEDCERVEFFDSNGLYRSEFKTKSVRASYPELCKVMTNNPHYKALGGQCAQQALKSVVESFSSFNGLLKLFWKGEINQPRMPSYRTKGGLAPISYPAQALSFDIETGECRIPISRELSDSVKEHLAVKELRINGAYGIKPSQIVELRIIPRNNEFYAEYVYKYGNEGASCHLGLNPKLALGIDHGVGNWLTCVSTVGKSFIVDGLKLKSINQNYNRRVASLKEGKSPKYWDFELARITEKRNRVMRDAINKTARFIINHCIQNQLGVVIFGWNARQKDGSDMGRENNQEFVQIPTAKLKIRIQQLCAEVGIQFIETEESYTSKSSFLDHDFLPQYGAKPISWKPSGKRGKKGDGIGRGQYRTAQGFLLNSDCHGAINIVRKVSTQLGLDLAKVCRAVLNLPKRYDLFNSLTKSYRKRCEVGLLDPVATSA

SEQ ID NO: 1164 - protein, 481 aa, synthetic construct
  REGION 1..481: note = Synthetic
TENYGSQLILIDLPPFETEVLKFICQRSNSLYNQAIYFVRRNHEMTHPGLLPNIPYSVLCSELKDLWNYSMLCAQAAQQTLKSVHEGLDSYKGLMSLWLTGGLESRPREPSYRERGGLFPVTYPAAACTFYLDRSEVRIPLGNGVKDDSGLTELFIPCPYGVSPERIKEVQLLPRNGQFYAVYVYSSQSFTSDVDITKALGIDPGLSNWLTCVSTDGKSFIIDGRKVKSLNQHYNKRVATLKEGKAQGFWNDELAAITEKRNRQLRDAINKAARFIINRCLADRIGTIIFGWNQGNKDGINIGNKNNQEFVQVPTAKLKDRIAQLCKQHGLRFVETEESYTSQSSFLDDDFLPTYGGEIPAGWKPSGKRGQKQKSVPHNLGRGGYQTADGSRINSDCNGAVNIIRKVATQLGLNLSKVIRAALTLPQRYNLDSLSRSYREKHEEARQQKSLVVTSQNPPCFNRRRSQECSLILNLNPYVFR

SEQ ID NO: 1165 - protein, 467 aa, synthetic construct
  REGION 1..467: note = Synthetic
EKTYGAQKVRLSLPELETELLLFLLQQANKLANCAIYALRQSVIWFGRSRFHLEVVKNELQTELKENVHYTVLHSQAGQSVLHKIAENFNAYQEGVSAFFRGENSIKPKLPHYRKKGGLHEITYPEQALKKKYDEHGYPMLGFPLGWDIKKLYGDDMHSIDYIWMPYPTNIKPSNIVEVTISPQNGDLYAVFIYKASTEIKPSLNYELALGIDHGVNNWLTCVPNTGKQGFIVDGKQLKAFNQLYHKEVSNGKTGKPEGFWNNHLNRLTGKRNRQMHDATNKAAKFIVDYCLTEKIGNIVFGWNKGQSQRMEMGRKNNQNFATIPTGKLKERLRQLCSSHGIHFHETEESYTSKSSFFDHDALHVFGERPESWKASGKRTKRGLYITGRGFHISSDANGACNILRKVADKIGISLSKISVNCCQILDRVYLWKRSRITEAQRKSTAACCQGNSSRLNRLVKIESPSS

SEQ ID NO: 1166 - protein, 908 aa, synthetic construct
  REGION 1..908: note = Synthetic
PYGCQQILLNPDNDLHAILEFLCGEATKLSNCGTYYARQLYFKTGKIPSKFDLNNELSNNIHFAAMYSQAAQQCLMGVAESFKSFMGLLKGIKNSTVTQKPKLPGYRDGGLSLVTYPAQAIKLKPQGLRFPLGSKVKAWFGIAEFYLSMPSNLDHKQIREYRILPRNGKFYLELVYKLPTIKSDVDFGKCLGVDPGLNNWLTCVSNIGTSLIVDGLHLKSLNQWYNKRVSVLNENQPQGFWSKQLAAITEKRNRQVRDAVNKTARIILNHCLENRIGTIVFGWNEGQRQNINLGNKTNQTFVQIPTARLKDRIAQLCEQYGLRFEETEESYTSKASFLDSDLLPTFGEKPEGWQPSGKRVKRGLYACASGLKINADANGAAKIGSIRETLLELKLMSLTEEILSQLPGDVLGNLRRADDVLKSIRENTAPTPSVVKESPATLETVNWDVIICGGTLGILIGCALAVRGLRVALLERGTLQGREQEWNISRKELEVFVELNLLTPEELKKAIATEYNPARVQFKDGAEVWVKDVLNIGVDPVYLLATLKQRFLDAGGQLFEHTPFSEVVIHPDGVMVNQQFTAKLLIDAMGHLSPISKQARQGKKPDALCLVVGSCAQGFSENSAGDLILSFTSLQNQCQYFWEAFPARDGRTTYLFTYMDAHPQRLSLEDLFGEYLGLLPEYQGVELQQLKFQRALFGFFPSDRQSPLKTPWNRILPVGDSSGNQSPLSFGGFGAMLRHLQRLTLGTQEALQTEQLSATALALLQPYQPSLSVTWLFQKAMSVGVNQNIAPEQINQLLSTVFQEMAQLGTPVLKPFLQDIVQFSALTQTLAKTGLSHPVLVAKIIPQVGLVNLLDWLVHYTNLGIYTALFALSPTLEIWIKNFPPTQQYYWHRLMDAWKFGSGGDYNA

SEQ ID NO: 1167 - protein, 429 aa, synthetic construct
  REGION 1..429: note = Synthetic
MFGCQQVRINPDQELKAVLEYLCSESNKLNNCAIYYARQLYFKTEKVVNKFALINELKQNPHYGAMYSQVAQQTVMAVAESFSSFVGLLKGIANGSVTQKPRIPSYKKKGGLALVAYPSQAIKLKKEGLRFPLGNKVKAWFGLDAFYLPMPSNLEYKNIREYRILPRNGEFYLELVYKVETNQAQVDGSKVLGIDHGIDNWLTCVSNVGTSFIVDGRHLKSLNQWYNKRVSILKENQPQGFWSKQLARVTERRNRQVRDAINKAARMVINHCLENQIGTVVFGWNKGQKDSINLGSNTNQKFVQIPTGRLKDRIKQLCEQYGIKFVETEESYTSKASFLDSDELPTFGEKPEGLALSKVEVWQESGKRVKRGLYRTANNWYINADCNGAANILRKVATTLGFNLDGVGRGALTTPLRSRFWTLKESHAL

SEQ ID NO: 1168 - protein, 446 aa, synthetic construct
  REGION 1..446: note = Synthetic
SNYGCQQNLISPNRELRSVLEFVCEESNKLANSGTYYCRQLYFKTGKIPGKYDLHKLFKENLHFKALYSHVAQQTLTSVAESFKSYIGLLKGIKSGTVTQHPKLPKYRKNSLKLVTFPKADVKLKNGQLRFPLGSKVKLWFGIGEFYLPMPSNLDYKTIREIRILPRNGEFYAEFVYQLQSTAIKLDTNKALGIDPGLNNWLTCVSNAGTSFIVDGRHLKSLNQWYNKRVAAIKEHRPQGFWSKRLALLTEKRNRQVRDAVNKAARLVLSHCLENQIGTIVFGWNKGMRQEINLGSKTNQSFVQIPTARLKDRIFQLCEQYGIQFVETEESYTSKASFLDSDELPKFGEKTEGWKESGKRVNRGLYRSKDGSKINADCNGAANILRKVAATLGLCLKGVSRGALISPLKVRIWTLQKSPSRSGLGSINCDSVLAEGTEFAIALPLV

SEQ ID NO: 1169 - protein, 298 aa, synthetic construct
  REGION 1..298: note = Synthetic
LRFPLGSKVKAWFGIDAFYIPMPSNLDYKSIGEVRILPRNRCFYAEFVYQQDIKSSEVDASKVLGIDHGLNNWLTCVSNIGTSFIVDGLHLKSINQWYNKSVAKIKENKPQGFWSNRLAAITEKRNRQMRDATNKAARIVINHCSDHKIGTVVFGWNVEQKDSINLGSKTNQKFVQIPTAKLKNRIAQLCEQYGIKFVETEESYTSKTSFLDNDFLPTFGAKPEGWKESGKRISRGLYRSQDGTKINADCNGAVNIIRKVAAIFKFDLIGVGRGCLSQPTKVLLRTLQKSPRLQTGEA

SEQ ID NO: 1170 - protein, 280 aa, synthetic construct
  REGION 1..280: note = Synthetic
AAKSSPLTRGTTRSWLGSRLTSCGGFGCKSFVELRKPENAVHKAVGKVIDFCLHHSIGRIVFGWNKECGLGWVFNQNFVFVPTGRFKERIAQLCWHYGMEFIEVEEAYSSQASFLDGDELPNYGEKPDGWRPSGKRVKRGLYQTAKGWLVNAEANAAANLLKKVSRTLGLCLQELSRGALTTPLRRPCKNPPPSGRGGCQLVKSSTQGSHCPKVVGQRPQAGIDTLERGKGLIPKGVGQRPPVQPHGTAQQQQVEVGKGEEGGCPLPAVRLLEQLHRLPN

SEQ ID NO: 1171 - protein, 436 aa, synthetic construct
  REGION 1..436: note = Synthetic
FYGCQQDRLKLDSFEQRVVEYLCRQANSLTNCAIYALKRAARQSGQVDYNYYDLDKHLKQNKHYKCLFSQVAQQTLMSVCESFKSHYEVIQLWYRGELEDKPKMPRYRKSGGMSGFTYPAQHLRLNETIETGLIRLPLGAEIGKLEGIKEIYIPAPKNIHPEKIKEVRIFPRNRCFYVEWVYQRKEKQYQLEFKKALGIDPGVKNWLTCVSTTGDSFIIDGKRPNFWNRTLNREVAKHNKGQSGDCRLSPSGERRCAPRAWSKKLALMTEKRNRRLSDYINKIARTIANYCIDSGIGTVVMGWNQGIKQKANLGKRNNQNFYQLPTAKLKERLKVVLTEIGVNFVEVNEAYTSKASFFDGDFIPKYGEKPDNWKSSGKRIATKLFRTAKGWLVNADAQASANILKVASIPSVNLDEITRGSVTCPTRLNLYPTVSV

SEQ ID NO: 1172 - protein, 461 aa, synthetic construct
  REGION 1..461: note = Synthetic
KKRFGVQQMLLNPDKETKAVLEYLCEQSGKLYNSGVYFARQTFFKTGKILTGKFDLVYESTVGKSQIAQSLPSTPAQQTLLSVTEAFKSYKGLRELWKKGQLLAQPKPPNYLKGSKLFKVAYPNSGGQKPKIFDRQLQFSLGLTVKRWFGVNSFRLPLPTNLDATKVKEWTILPKNGAFYLEASYELPREQTFKSLDDLPKDARRAVALSIDLGTADNLAACVDTLGNSFLIDARAMKAFNQYWNKQVATRKETKPEGYWDAWLDRVTRKRNHRMRDGINKAARIIVNHCLSYRIGTIVLGWNEGFKCNANMGRLNNQKFVQIPLGKLKGRIEQLCNLYGIKLVITEESYTSKASYLDGDSLPKYGEKPYGWKASGRRTQRGLYKSQNGSLVNADLNGAANIMSKVARKLGIDLDRLGRRSLTTVARVRLWVLPQFTLSAESPRMQDRGVSTLIVNLGVRY

SEQ ID NO: 1173 - protein, 505 aa, synthetic construct
  REGION 1..505: note = Synthetic
GTTIAVRQLQIRLTPEQHRMLDFLFDRSRALYNQALFVTRRSFIQTGFIPKTGTLFFRDEVKARGFRGQAPRKKPGKDELLKVSPKPHPWTVPLKDRFVGGTLDSLDGSVHRKALPASVADQVLWSVHEAWDSYRELRALHAKGQLHFRPKAPGYLKAGTAFKLAFPNSGGGKPKVLEVLDEATGEMVMFIRFPLGDTLKTWFGLSELKIPVPKGIDPSLVREWTFRKQNGVILLEISLLKERPALVPLDPSRILGIDPGTSANLAACVGTDGSNLLIDARGMKAMNQWYNRCIALRKKGKAEDYWDARCDQLTRKRNNQMRDGVNKAAKLIVQHCVNRGIGTIVFGWNAGIKQEARLGKDTQNFVQMPLARLKERVRQLCELHGVQFHQQEESYTSKSSHLDGDTPPVYGSKLDGWTASGTRTRRGLYRSARGMRINADLNGAANIIQKHVTGTTVEGAEMPLQRFRLGRRCLTTARRTRLWERRLNTVCSSQSRCVSASLSSR

SEQ ID NO: 1174 - protein, 328 aa, synthetic construct
  REGION 1..328: note = Synthetic
MYQIVYPGQALKPVEGGFLVPLGHGGKAHFGVANFFVPCPQRLLDKVIREFRIIPSQGEFQIEFVTESLEEARCERCELIPEQWLAFDPGMNNLVTGVSTTGESFILDGLALKSYNHFYNKQKAHYQSILELQEPGRKVSAKLQTLNRNRANFVRDYINKAARYIIDFALERGIKGIAWGVNQEQKNGIKLGKRINQQFVQIPQARLRKRVEQLAFLHGLRFVETEESYTSKTCYLSGQLLPSFGEKPEGWVPMGKRVKRGLYKTFNGMFINADCNGAANILQKVAAKLGFEPSRVSIGALTAPYRVRHQHGKFLPGCPTIEAQSLQG

SEQ ID NO: 1175 - protein, 434 aa, synthetic construct
  REGION 1..434: note = Synthetic
MFLAVQKDIFQPDKQLAQLLTELARLANNLYNQGVYESRQYFFEQGRKPFKVLKYVNLYAKLKESENGKLLHSQAAQQVLKSVNEAFKSFKSLSKLFKLGQFEHEPKLPRYRTKGGLYQVVFTGQSLKVEKGLIRVPLGNGGKAAVGRDAFYIPLPERLKDVHIRELRFIPTNGQWVVEYVYFTMDKTAQCCKLCPENVLALDSGLNNLLAGVTNTGLAFVLDGRGLKSRNQWFNKQVAKFKSILTHGKPSMKGATSKRIQLITHKRNCYVRDYINKAARWVVNFCLENDIDTIIYGRNNGQKDEINLGAKTNQEFVQIPHYKLFGRIKQLCLIFGIRLVETEESYTSQASFFDNDFLPTFGEKPEGWKASGKRILRGLYRTAQGWLINADCNGACNIMRKVSTKLNIDLSGVCRGAVAAPSKVKLEQIGFALA

SEQ ID NO: 1176 - protein, 511 aa, synthetic construct
  REGION 1..511: note = Synthetic
FKSKEQKEQDKEKNKNTHISTVVQHLKLSNLGYAVISDILSHANSLYNTLTFNLRQGFFVHKILNFQSLTIDLQTDFKENYHYKMLHSQAAQSVCHKVTENFKSFKQLLDKHFREGTKKPLLPGYRQKGGMFEVTYPSQSVNISQEHGIIFATVSTGIMFKKQHKEDVMGTSLNERLRFRVPDDIDPSNLVELVITSKHREIYLHWVCRKKNEIVATLNKSSVLGIDIGLNNFVTCIPNTGEEGFLINGRPLKAINQFYNKTVSKLKKGKDENFWSGSLARATQSRNNQVRDFIKKSARTIINKCLESGISKIVFGWNQGIKNEIDNGRVNNQNFVQVPFTALRDTLKYLCERSGIEFVVVEESYTSKMSFFDGDELPVYGQETEEQKNLKPSGRRTKRGEYKTGNNTIINADANGASNILRKAKIDTSKITFRVCQILKTINIWIGHAQGKKKRGNAINGYPALPLNKSRGLGIPPFFKGLILGKKFPSRKGTAAGLSCCTTIGLTEPGQ

SEQ ID NO: 1177 - protein, 417 aa, synthetic construct
  REGION 1..417: note = Synthetic
AQKSEIRGLPKKQYSMLLEMCRYANSLANVAEYHIRHYRSRTGAYLSYEKNCRISKYNLNYKMLQAQVAQQTLKRQDKKHQAYFGLLKAKKNGSFSGPVRPPHFRKKGGYDNLYISGKYVIMRGEHIALPMSRAFREKYGGEEILIRIPPVVHGKKIHEVQIIPERDGSFIDAVFVYEEPENAKLKLHKNNILSLDPGLDNFVTGVCTDGTTFIVDGRRIKSINQWYNKLRAEKQSKLPKGVSWSRFLTRITRRREHRIRDFIHKAANEVIRQAREHNCGTIIIGANRGLKQNICLGAVTNQNFVQIPHARFRAVLEEKCTRAGIRFVCQEESYTSKASALDRDPIPTFDPLQQQICTFSGRRISRGLYRSKDGTLLNADVNGALNIARKSKQDGSIPKCARLCRGVLDTPARIRIV

SEQ ID NO: 1178 - protein, 455 aa, synthetic construct
  REGION 1..455: note = Synthetic
VLLTQSVLIRGLTMKQYNVLVDISLKLNYLRNCAVEKTPFVKSTDKKHFKKINFKSIISKVKEEFKMEYSFIQAQLANAAIKKHVESFNSYVELKNKKIDGEYDQKVNPPKKHKNYRLHNIIIPKESITSSKKKLREGFIELPLSRNYKKLLESKNCRPRIKIPENIRDKKIIQVEIIPINNGKMFKANFTYEAEKEPLDLDKDKIMGIDPGVNNFATIVTTEGPPCIVDGRKLKNQIYFKCKKTAHYQSILNKQGRKTSNRIRKINQKFKNIQDNFLNQTVNFIIKKCKEQDVGTIVLGYNNNFQHKTNMGKKQNQIFSHIAFKQFKQKLETRCQIHEIDLIIQEESYTSLSSFLDEDILPEYQEKKDAKNKGDKKKKDKKKKDKKKEDKKKEDKVKYEFKGNRTKRGLYETQNGKIINADVNAAANIIRKCKHRFNFELLCKWVQTTPSKIKL

SEQ ID NO: 1179 - protein, 418 aa, synthetic construct
  REGION 1..418: note = Synthetic
VQSNVIRGLSKKQYALLKEMCQYSNSLYNVALYNIRQHYFNTKKFLTYESNYHECKENENYVYLQAGVAQQTMKVVDRSFKSFFNLIKKCKIGDYRYHDVKMPHYRKKSGLFNLVFSTNAIAIKDGMFKVAMSRAFRSMHPDVKEISIPFPERLKDTTIKEVRILPCNGGKFFKIQYVYEVTPEVLNLNKDNILSIDLGIDNLATCVSTIGTPFIMDGRRIKSINHRWNKEMARLRSISMKQGLKTTAKIQKITTKRNNQVNDTIKKTARYIINYCIKNDIGTLIVGYNADFKRNSNIGKVNNQNFVQIPLGDLRQQLEFLCWKYGLDYFEQEESYTSKASFLDKDKIPVYKPEQPYKGTFSGKRVHRGLYKSKKGTTINADVNGSANIMRKCKQNLDYEKLCNGLLTSPRRIRFAYL

SEQ ID NO: 1180 - protein, 429 aa, synthetic construct
  REGION 1..429: note = Synthetic
TQKNQIRELSKSEFASLRELCRLSKNLYNVGLYTVRQYFFQEHKHLRYESAYHLCKTNENYKGLNTDIAQQTLKVVDRTFKSFYGLISAVKNGSYHQKVKLPNYLPKEGHFLLIIPRIVIKEGKFRVPMSNAFRKQFGEVWIPFPKRLNINQIKEVRIHPKYNARYFEVEFISAVEPEPIEAKSDSAISIDLGVNNLAACVDTNGASFLVDGKPIKSINQWFNKRNAKLQSLKDKQGIKGITNQQVKLTAKRNNQVRDYLNKTARFIVNHCKGNQIAQMVVGYNPGIKQEINIGKCNNQNFVQIPFHSLRSKLKAMCARYGLKYIEQEESYTSIASAIDGDEIPVYNADNPKEYQFSGLRIKRGLYKTKDGHLVNSDLNGSLNIGRKSKHNGFTGVSRGSLTAPRRINLLKLERKTRRNTALACQVASF

SEQ ID NO: 1181 - protein, 634 aa, synthetic construct
  REGION 1..634: note = Synthetic
TQKNQLRDLSKAEFLALRELCRPSKNLYNVGLYTVRQYFFEERKHFYESVYHLCKDNENYQLLNTDIAQQTLKVVDRTFQSFYGLIGAIKSGVYQQKVRLPHYLPKDGYFLLIIPRIKVKNGKFKVPMSHAFKKQFGALVLDFPERLNPETIKEVRIHPKYDARFFEIEYISQSESEPVETVENSALAIDLGLDNLATCVDTNGASFIVDGRRLKSINQWFNKENARLQSIKDRQKIVGSTSGMPQRLTERQARLYINRNNQVRDYLNKAARWIVNHCISNKIACLIVGFDPGIKQEINMGSRNNQNFVQIPFHAPSNKLKSLCERYGLIYKEQEESYTSKSSYLDGDDLPVYNADKPVAYQFSGKRIKRGLYRSKEGHLINADAQGAANIGRKSKQNGFTGLSRGCESPAVANQALLGFISQESPCVRARECQSPFKIENHQSKMTAVPLPRPSPQPADRPTGRNSTDATPVFALKELVARLHRYQHNVQDMLGSLGFALRSFNNLNQFLELVPLVATRVTDADGGALVLFKPNGQVRFQQLHCQEGRQCQDMRKALEIATRQATAGAGAAGESFSETSGQTSSLDLQVGRYLGPDVHLFGAPVLVKNLERGRLFVFSSDPQYLWTPGRQKLV

SEQ ID NO: 1182 - protein, 335 aa, synthetic construct
  REGION 1..335: note = Synthetic
TQANRLDLTKEQAKTLKELCRLSKNLFNVGLYTVRQYFLNERKHLRYESVYYHCKTNENYKLLATDIRINEIRVYPRFDARLFDVADIYESADEQIQDAHKVMEINLGVNNLAACISSAGTGFVIDGKRLKAVNQWYNKRAAKLQFHKDKQGIKGITHQQARITDKRNHFVQDYLNKAARYIINHCLSHGIGKVVVVGFNPGMKQEINLKSRNNQNFVQVPIAVLRLKIQSLCERKGIVLVEQEQSYTSKSSFVDSDPLPVWNTDNPVEFQVSGKRVKRGLYRTKDGHLINADMNGAANILRKYFSSTLNELILKENKSCLSQPVRVYLLTNSRL

SEQ ID NO: 1183 - protein, 408 aa, synthetic construct
  REGION 1..408: note = Synthetic
VQKEILKLRTRKEYLALRKLSHLSKNMYNVGLYSVRQHFFETKKYLRYKENYHVCKSNENYKLMGSAAAQQTLKKVEENFKSFFGLLKAEGQKARIPRYLDKEAHFELSYPQFKLQKDGTFNLPVSPAFKREYGTINVHFPSNLDSSEIAEIRILPKYNAHYFEIEYVYKKQVEQQKLNKEEALSLDLGIDNFVAGIDTLGHSFLVSGKRVKSLNQWYNKENKRLQSIKDKQKISHLTNRQVCLLRKRNNVLRDFLNKTTRYVIKHCLDNGIGKLVVGLNKGWKQSINIGKKNNQKFVQIPHSQFIRKLERISQRYGIELIVQEESYTSKASFLDNDKLPVYHKNSKENPIFSGKRAFRGLYKTSMSIFVNADLNGAANILRKCNHTSEFSDKVARGLLAVPMRVKLV

SEQ ID NO: 1184 - protein, 436 aa, synthetic construct
  REGION 1..436: note = Synthetic
TQSIQIRGLTAEQYEILRYQCRLAKNMYNVGLYSVRQFFFAQNRCLSYESNYYHCKDNENYGLLYSQVAQQCLKFVDEAIRGFFKLLERKREGKLAARISLPHYLKKDGYFPLVYTQPNIKEGAIQFSVSNQFRKNYREETGKAFKAFKFLIPPMIKGKKIHEFRIIPKYNGRYFVAQFVYEIKEEIAENLDKDQCLSLDLGLNNLVAAIDTKGSSFLVDGRKLKSMNQWYNKQLSKLQSLKDLQGIKRLTNKMAKLILKRTNQVNDYLKKTARLVINYCLKHKLGTLIVGVNEGWKTSINIGKVNNQMAVPPLGETPRPHCLNFVQIPFHALRQQLAYLCKRYGISYIEQEESYTSLASALDLDELPEYNADNPKTYQFSGQRIKRGLYRTKNKKLVNSDINGSANIGRKSKANLFKKREVLEGLLDAPIRYFIV

SEQ ID NO: 1185 - protein, 429 aa, synthetic construct
  REGION 1..429: note = Synthetic
TQKVRIKKLTKQEYEAMCMLHRYAKNLYNVALYELRQYFFDTGKLLSYNKLYHICKTNENYKYIQAGVSQQILQRAYEAMKSFLELRKKANKGEYLTEAVSIPKYLPKDGYYQLCCSTNAIAVHDGYFQVPLSRLFSKEHPDISISIRVPERIAGKSIREVRLNPKYNACYLEAEFVYEAEGTAASHGTETLALDLGVNNLAAGISTAGTAFLVDGRRLKSANQWYNKERARLYAIKDMQGIKGETHKLASIVANRDNFIRDYMSKTAHMIVQHCIENNIGRVIVGVNPKWKQNVEIGRVNNQNFVQIPFKKFRRFLGYLCGKYGIEYKEEPESYTSKASFLDMDEIPEYDPKDDTVYTFSGRRIKRGLYRSANGQKINADLNGAANILRKAAPDADLSLVKKALCINPTKFYPLATVKKRNIKSKAAA

SEQ ID NO: 1186 - protein, 236 aa, synthetic construct
  REGION 1..236: note = Synthetic
IEYAVKTITTPSLDRDKALGIDLGIDNYATCATTDGNSFIIDGRHLKSILQGYCKYKAKIVSANGGKYNTKRLVSLHKKTHNKVNDYVSKSVNYIIKYCIDNDIGQIILGWGVHFQQYTLGQNNQLYSLFPFAKFKDLISFKCRQYGVDFKTVDESYTSQASFLDNNPMPKYVTREKQSFSGKRVKRGLYKSKDGVKINADLNGAFNILRKGNAVINIDLGGRGIATPKRINPLKD

SEQ ID NO: 1187 - protein, 417 aa, synthetic construct
  REGION 1..417: note = Synthetic
FKMYGSSKIELNDLTPNERLRLRLLSEMSRKLYNRSMQIIIDTYENQGKVLYYDSLKPLVKDTEEYKNITGYYYATICAAVADFRKYLSTDMYVLNKTDRTLKDKNLDKFYPPKLRDEPRIIEMKQPLIKDGFVILPATKQTPPVRLRIPECYRSKDIRAVTVRPLHNMTHWEMIISYPLETVHHSDLDYSHALGIDLGMVNFATCADSVSGECFIVDGKGLKSILQGYSKYLASLRRASGQNDTKRIAALKKRTYQRVNNFVGKATSYIIKYCLEHGIGKVCLGWGVHFQGQGSNLNLSLGVNNQLFYLFPFAKFKNALQAKCQLHGIHFVLVDESYTSQASALDNDTMPEHITGTKQHFSGKRIHRGLYMSADGIKTNADQNAVWNILRKGSVTLPFLQGADGRGLMPPYRVKVI

SEQ ID NO: 1188 - protein, 421 aa, synthetic construct
  REGION 1..421: note = Synthetic
LIQYGTAIIHLKNLTEEQSAAYLLLCSFSKNLYNLSVLVLNREYEKSGQVLDYNALKLKLSNSEEYKILGGMYYAILIEAIANYKKYDKLLHYSSTKDKQLLEKKNLTKIEPPSHLKSIFPVYLKRPKQSEDNIYFPKTKYTNELAISLPKDYADKEIKQVILRPTQHFMNWELIIQYQLPTIKNTGLEPDNALGIDLGVSNFCTCAINNGNSFIIDGRRLKSIIQGYCKYNKRLSKNENKATRRLASLQRKTANRVRDYLNKTAAYLIKYCVQNHIGTLVVGWGLHFQEFYIGKQNNQIFSFFPYAVFVHALRTKCHQNGITFRKVDESFSSQASSLDLDAIPEHVTRLEQHFSGHRRYRGLYITKDKRKINADVNGALNILRKGNAITDTEIICFGSRGLVPPERVSILSKSTQLSKFN

SEQ ID NO: 1189 - protein, 381 aa, synthetic construct
  REGION 1..381: note = Synthetic
AIEYLTQNIHLKHLTPAEIECLDKLSKLLRQHYNYLIWCLDLYYKAEGKLMPLGMLLQAETNSKYYLGGGFYLARQARTNFYTSFLKNNKPIKQTNKPMSITFKPKIQGNRITMQATKYSPPITFEADLICDCKDIKTVTISIRSRKMGYWKAAITYEQTSTENPPICSYDGLVCAGLDFGIENFATICTSNGKSLIVDGRRLKSIVHCYIKNGKSAAASIRYNNRTFDYINKSVSVIVGFCIKNDVKAVVLGEGVINGAFRVQQQNKFLNLFCFSQFQKNLIQKLKMNGIATYLVNEAYTSAASFLDNDCMPMYTTRTKPNFSGKRTRRGLYVSSNGTKINADINGSLNILRKSRIVDLTELQRNPSLIEHPKRVDPLNQ

SEQ ID NO: 1190 - protein, 371 aa, synthetic construct
  REGION 1..371: note = Synthetic
MYSSTTIHIKNLSADDIKTLNLLSSMIAELYNNCINFIKSNYENDNYIPDDVSLYREMSKTTAFSNLGKSYVYTLNIATQNFKTSIRKHLKLPNSQKQYHGITLKGNEAHGTYVKIPSTKYTKELIIPIPPIYQNLEVSIFHIKRCSADYWELILTYKSKLQIPDFKKVNFVGVDLGLENLITAVCSNGNTVIFDGRKCKFIHYQKLKATSKKQYYRLRNQMTDYINKVINAFIQFCIENEVKAVLVGNGFSRYYREGYMDKYCKEIPYDDLQAKLKDKCLKYGIKHYTTSECYTSKASFIDNDITPLDLRGTKKFSGKRKKRGVYVSKDGYILNADVNGAYNILNHSHECDLSHLQNNPKLIKQPKRIRF

SEQ ID NO: 1191 - protein, 421 aa, synthetic construct
  REGION 1..421: note = Synthetic
DKNKQLLKRLCILSRDIYNTALQNIKSHYKKTGKFLFWIDNAKLVKNLPEYKEIGSRYQAIILEADKDFLTYQTTIDYESECGNRWQIFNPPKKLIPPRAKKYFFPLICNDFEQRDGKIKLPLSRLLAKEYPPIYFTLPPDIKDANVVRFVIKPKYGFSAYEIFLTYEVQKQPQDLDNTKCLAIDFGVDNFATVCDSEGKSFIIDGRYLKSIIQGFQKQMAKIRNVKRKQSIKGYTKREMRITDRYQRRIDDYLNKSAKYIADYCLREKIGNIIVGCGYSFAKGPNLFYRIFFQIPYRKFLQKLDFKCQKFGIRLIKQNECYTSKASFIDNDPIPEKISRRKYVFSGKRLFRGLYVSREGIKINADQNAALNIMRKANEKYKLVSPEKIRALQRRGAIVPPTRINVLKHSCKKDKTLKLNQ

SEQ ID NO: 1192 - protein, 431 aa, synthetic construct
  REGION 1..431: note = Synthetic
TLKYNLKINNRETKAFLKFLCHVSKNIYNNALYELRKQYFETGNICKYFDLNKLMVSKPDSKIMNMAMTYCINRDAHVAMSNFVYHKYKTIDMPKYKEKHGYYNLYIEESDTLRDCRVGNQIKFPLSRLILSKQIKSKTYEDEEVNQFIQSSNKMEYFYIKVPKCIENEEIRQLQIIPRFDCRYFEVSITYAVDKTETKDVKKSGTLAIDLGIDNLATCVNSNNNESFIIDGRLLKSKNQWINKQLAYYKSKVLRGTMTNNIASLYMRYNWMMSDYVYKSARKIIDYAVKNNVKNVVIGWNQGFKQKGFSNSTNEENARKNQNFLQIPLAKLKDRIKSLCEENSINYIEVDESYTSLCSFYDGEDIGKHDEYLGKRVERGLFKTHYGKLVNADVNGALNILKKSKTESDSTINRLMNSGLTVPYRIKVLYS

SEQ ID NO: 1193 - protein, 411 aa, synthetic construct
  REGION 1..411: note = Synthetic
MCHIAKNVYNDAMVILHNQYRTYGRIPSAYNLNKINSLYINSKVLNAYVAKSIDNEAYNAMSKYVKNPKATRCPKLLSEDELFPLIIEHKNVLASCKKRGKIKFPVSSLITSNELENVRLKEKIIREYKDVEVKVERFEINIPKEVKDKNIKRVNIVPRFDGRFFIVNITYLEGKENQEIVSQNRKGTLAIDLGINNFATCVNSNNNESFIVDGKYLKSRLQWFNKQIAYYSSHLEKDQKITCRIASLYMHKNWTIKTYVNRASRTIINYAIKHNIKTIVVGWTYFYKDKKFKLKTQDDHKRVIQLFKQFPLAELKERIRFMCVDNGINYNEVDEKYTSKCSFYDGEEVGFHYEYLGKRIKRGLYKTKNGILVNSDVNAALNILKVSKTEDDETIHRLMNSGVTVPLRIRE

SEQ ID NO: 1194 - protein, 445 aa, synthetic construct
  REGION 1..445: note = Synthetic
TIKYHYKASSKEKQLLKLLCRISKNIYNSALYELRQQYFNKKNICTYFELNQIMKYNPNYHILNTYQSLCTIRIAYNNISKYIRYHNEKGEFIGKGNTDFARFPKYKKKKAVMPLVTDQIRPVWYKGHKCIKLPLSNLTRTSKIFNKVFEDELINLFIKESELKESFDIYFKIPKELYKYNIHQFRIIPNSIGNDYTIEFIYEVGEYAKTKININKSMAIDLGISNLASCIVTNNESFIIDGKKLKSINQFYNKQKAYYQSKLPQGTKYSNRLRNLDKKRNRQVEDYLNKAVATLITKAIESNIDEIIIGWNNYIKTDGIKNDDLKGKDKRRVNQTFVQIPLSRFKDKLVFKCRQNGIKTVVINESYTSKSSFYDNDPIIKGKYSGIRISRGLYQTKDKRIINADINAALNIYKKAVITCNSTNNKIDYLMSRGLTIPNRILVKL

SEQ ID NO: 1195 - protein, 428 aa, synthetic construct
  REGION 1..428: note = Synthetic
VIKYKYIPTKKERRLLRLLCHISKNLYNSTLYILRQEYFKTKKVIKYYDLNKIMSDNDNYKILNSYISICIIKSVHTAFTNFSNKITKLPKYLKKNDYYQLYTEQILPKIINKKLVIKLPLSNLTRTSKTFNKMFEDELINKFIKESDIKRSFDIYFKIPEVIKDKDIRVFRIIPSFKGLSYDIHITYVDDTNIKINKNPNQIMAIDLGVNNLATCVLSNNESFIIDGKYLKSINHFYNKQKAYLQSKKPNQKEYTLMEHRITEKRNRRVNDAINKAARQLINIAIESQISEIIVGYNKGFKTDGIKSDLPNKEKARINQNFIQLPISKFKNKIKELCKRYNIKYIEINEAYTSICSFYDNEEIKYHKNYLGKRITRSLFKTKEGKIINADINGALNILKKGKPDRIDIISFLRNIGQTVPIRQKIKL

SEQ ID NO: 1196 - protein, 432 aa, synthetic construct
  REGION 1..432: note = Synthetic
VIRQRLNHLSRKEYESLYSMCKISKNLYNQTLYNIRQHFFQTGSYLRYEENYHLLKHSENYRMLNSNMAQQVIKKAHASFESFFSLLKQAKEKNLPRPSIPRYLPKDGLYPLHIVMFSIRDGYLTIPVSKQGKELFGEVKIIVPKMVLGLDLKEVKIVPEAKGKWFEVHYVYRVKEREEKKNKPKKVLGIDLGVDNLATCISSDGKSFIVDGRDIKAVNQWFNKELARLKSIYARQGIKSSKRLAVLSEKRQNQIRDYMHKTARTILDFCLKEGIELVVVGDCSYVYDKPEPGRVNNQNMKFLPLGYLRELIRHKCEKHGITYMEVDEAYTSQADSLCRDYIPKHHERGNHVFSGKRISRGLYLSGTGKVINADVNGAINIMRKAGFEPEFSHIPVPVRVKVWRNASNGAYAVGGACERSSEETSSSESSMP

SEQ ID NO: 1197 - protein, 433 aa, synthetic construct
  REGION 1..433: note = Synthetic
GKTMEYRAIKTRLYLERNDKIFLLTLMHSAKSLYNQALYNVRQYFIENKQYLSYEENYKLLKDTSEHYRILNTSQGQTIIRKVDEAMKGFFGSIKKNLNHKVRLPRYLDKEGYYSLIDRMVYKPHNEYYTLPRGNFIKKISNQLLEASNKLDIRNRRELKIYEGLNVRIETPKCIQNKRIKEITIKPKFDGQYIEVIHTYINEEPVENRANTFIETMAIDLGYNNLAYCAVTNGQHLHIDGLKLKSMNQRYHKRISKLLSIRPNQNVLTKRMMSLMEKRNNQMDYGIFKAVKLIVEHAISNHVGKIIIGYNEGFKDINLSKQFNQMSRSIPIARLRDRIVYLAKRYDIETEIVNEAYTSKSSYIDKDEIPSLSDKRKTSFSGKRIKRGLYVSKNGICINADLNAALNILRKGKHDALWIGSKGLNTPKRTYLF

SEQ ID NO: 1198 - protein, 448 aa, synthetic construct
  REGION 1..448: note = Synthetic
KTMSSHLSLSEEKNVLLTFLCRAAKNLYNEALYAVRQAFIYDGTYLSYGENEKALQNSLNYRILNSNMAQGVVREVDEAMSAFFGLIRAKQAGRYHGPIHLPGYMRKDGYRAIEISFVRTIWRNGKLCLDLPRSNLVRHVSRYQEEIYKSAKRQGYAETMELENGQHLTFEVPKPIQDKVIKEVRIVPKFQARMFEIQYVYEWEAESRDREIIPGTSLAIDLGVNNLATCVDSDGSSFIIDGKVLKSRNQLYHKKMARLSSQNAKTPETLTRRQIALIMKRNDQVKYYMNKSARMIVDYVLKHKIAEIIIGNNEDFQSGGISKQSLPRRIKGQINQQFCALPLGQLRNRLEQLSNDYRIVFTLQEESYTSQASFYDEDEIPVFEKGTETKTGFQGRRVHRGLYITKTGMSVNADVNAAFNIMKKSKPNTSFEKIWSRGASTPLRLRVV

SEQ ID NO: 1199 - protein, 484 aa, synthetic construct
  REGION 1..484: note = Synthetic
VLKQKLKSTKGEFFIYRFLSRMCKKAYNVALANIKKNYELNKTFIDKYDNYEMLKNHEVSLWLNSEVFQKTTFSANEAYESYFNLLKYQKDNNLEITAKEPGYIKGYYPITFSYLGKKMENGKRVFNIPLSVLFKQFLREIAPDIKILEKYINPSMFELPDEYFIRLSIPRYLTNKKIKEVSIIPLYNGKKFEIAYTYLDEDEIKESKGDTTLAIDLGVNNLATCVTTKGNSFIIDGKRLKSMNQYYNKKMAKLKSENQYVLRKNKNPLTGERIYLKDLRKNLSENESYKNIMTKRMIRLMGKRDNKIKCYFYKSSKMIINYCLENNINRIIVGYSKDFQNKGFVLSKEYYAKDNYSKHIEKEMKKKNNQNFLMIPFEKLINRIEYLCSKNGIECIIQEESYTSASSFFDLDYLPIYSKGKNKEYTFSGERIKRGLYKTKEGKCINADINGALNIYRKSSVCDINTIEYLLRRGVNTPKRLQVI

SEQ ID NO: 1200 - protein, 478 aa, synthetic construct
  REGION 1..478: note = Synthetic
TVKQQVSKYKYKQLYILFKKLCKYSKNLYNSALYNIRQYFFNTNKYLNYNNNYHSIKNNINYKLCEAQIACNILHIIDESFKSFFTLKEKGFKCNIPKYLDKNDYFILPTNKIHINKNNEWIIPLSYQILKEYNLTLKSKNRFKIKIPTILKDKKIKYIQVIPKYKGRIFEIHYTYEININNNIQINNNYLAIDLGVNNLFTCINYSHNSKKKINSFILDGKELKSINQGYNRIISKLQEKNTNKKLRYTKRMYNILKKRNNKINYYIHKTCKKLINYCLQNNIKTIVLGWNNDFQRKSNLGRKNNQYFANIPFSKLKDNLEYRCKMNNIKFFLQEESFTSKASFLDNDYMLSYKKDEKLGYVLRTINDKVESTYVDIENSTLKKKYFTGKRVKRGLYKSENGILINADMNGALNILKKYLLNEEYKQLNKGKVVSRKISYEDLIESRDIHNLYEDISTLYCRGALVAPIRIRVRESI

SEQ ID NO: 1201 - protein, 489 aa, synthetic construct
  REGION 1..489: note = Synthetic
TYSIFKQKLTYKKYKQYFNILKEMLHYSKNLFNEALYILRQNFFDNQNKEKKDRKYISYYDLYNMLKNSNNYKYIQAACAQQILKIVYETFKSFVALKKKKIKCNMPRYLDKDGYFQLIDSEDDKRINKINNKLYYTIPMSYQFLKEHDLMKINDRIKIQIFHILENKKIRQIRITPKYKAKYIEIHYYFEKEKDQIDPLAQVKENNNFNILSIDLGINNLTTCTIYKPYEKLKNKFRAFIIDGKKLKSYNQWYNKRIKFLKKKLNEDKNKNNQIHYSKQMYNITYKRNNRIYDYINKTCNYIVKYCLQNDIHIIILGYNQGMKQNIDLGKKSNQKITNIPFYKLKEQLIYRCEEKNIKLIMQEESYTSKANFINNDYIFTYDKNALRTIKNKVELKKIIFSGIRRKGLYKTNNNIKINADVNGSLNIMRKALLNKEISNIISNVVNEEHLICGEQIIDKKILSRLKEDVKKILDIRGGLVTPIRIKLV

SEQ ID NO: 1202 - protein, 428 aa, synthetic construct
  REGION 1..428: note = Synthetic
TMQRFTQKQNIGRACLTAKEFRLLQRMSHSSKALRNVGLYTMKQSYLNHNRMATIKEVDTAMQADMNYWGVQSNSVQAIRRAVFTEVKSFFKVLEQWKKNPEKFTGRPKFPNYSRSTDKRIIEIYQVPKVDDSDECCIQKKIGSIKIRMPKNIRNKKISYIEIVPKQKGRFFEVHYTYEMHVSQMKKKSTTTSNALSCDLGVDRLLSCVTNTGDTFLIDGKKLKSINQYFNKMIRNLQEKNMDNGISKRVVTNKMATLWNKRERQINGYISQTVGLLFKKVKAFGIDTVVVGYNAGWKQKSDMGKKNNQTFVQIPFHKLMAAIENKCIKESIRFLKQEESYTSKASFLDKDPVPVWSKDDKMQYLFSGKRITRGLYQSKSGECIHADINGALNTLEKSKVVELEENLKVKTPILLEVQKRKAVASRIA

SEQ ID NO: 1203 - protein, 414 aa, synthetic construct
  REGION 1..414: note = Synthetic
TQRQQLKNLTKKEYQALREMCFLAKNLYNVGTYNVRQHYFNQGEHLNYEANYHVCKENENYKLLNSNIAQQILKEVDSSFRSFFGLIKLAKEGKYDFRGIKSPKYLDKEGFFSIIIGQIRIKEDGTLNVPMSPAFKKLYGKVSIKVPQNILEKKIKEIRIIPKHKARFFEIQYCYEIPKSEEVSNQKNALAIDLGLENLCTCVTNLGDSFIIDGKRLKSVNQWANKQNDKIEALKLKKNITAITRKQFKVWNKRNNQVKDYVNKTCFYIIDYCVKNNIGNLIVGYNAKLEKSDNMERKIYRNFIRIPFGEIKGKLEYLCKIKNINFIRQEESYTSKSDFFADDFLPDINVDNVKKYDFKGERITRGQYKSSVGIVINADVNASLNILKKSQVVNLSNLQNNPQILKQPQRVRIS

SEQ ID NO: 1204 - protein, 284 aa, synthetic construct
  REGION 1..284: note = Synthetic
MSPAFKKLYGKVSIKVPQNILEKKIKEIRIIPKHKARFFEIQYCYEIPKSEEVSNQKNALAIDLGLENLCTCVTNLGDSFIIDGKRLKSVNQWANKQNDKIEALKLKKNITAITRKQFKVWNKRNNQVKDYVNKTCFYIIDYCVKNNIGNLIVGYNAKLEKSDNMERKIYRNFIRIPFGEIKGKLEYLCKIKNINFIRQEESYTSKSDFFADDFLPDINVDNVKKYDFKGERITRGQYKSSVGIIINADVNASLNILKKSQVVNLSNLQNNPQILKQPQRVRIS

SEQ ID NO: 1205 - protein, 421 aa, synthetic construct
  REGION 1..421: note = Synthetic
KAWKCNLKKLSAVEYQILRDMCHASKNVYNAAMYNVRQHFFQQGEYLNYEANYHLMVGTDVYNYLGNVAQQSMKAVDSAFKAFFALKKKVKQGTYPADAVQIPHYRDKDSFYKVEFNSPRDQQKHIEQGFYILPMSRFLSSKYPGTKIKVTIPNHIRNKHIRQIHIIPKNNGKHFVLVILFDDEIAEQLILDSTRALGIDLGVDNFATCATSDGDSFIVDGKNIKSINQWYNKENARLSSIKDKQKLSKKATKLQAAKSAKRDRQIQDYIYKVSKYIVEYCVDHNIGNIVVGYNDGFQDNPHLGRVNNQTFCMLPYGKFKERLEYLCNLVGIKYSKQEESYTSQASFWEQDSIPVWNPDNPVKKEFSGKRIYRGYYRRFNRTWINADVNGALNILRKSNVVDLSVLYSRGVVRTPMRIRLA

SEQ ID NO: 1206 - protein, 316 aa, synthetic construct
  REGION 1..316: note = Synthetic
AVIPQYCFYSKYNGKSTIEQLRGVTFLFSSSSFHIVYKKTHKAIEIKIPPILADKKIKEIRIIPKANARFFEIQYTYEAECIQRNLNTSNALAIDLGINNLVTAVLSMGESFIIDGRKLKSINQWFNKENARLQGIKDKQNFGKCPTNKQKAIARDRNNKVNDSMSKAARKIIDYCIQNDIGTLVVGYNETFQQSARMDKVNNQSFVNIPYWKLREKLEYLCKLNGIVYVKQEESYTSKASFWDKDDIPVYNEDNPKSYVFSGKRVHRGLYKCSNGKTLNADVNGALNILRKSSVVDLKVLYSRGDVDTPVRIRVA

SEQ ID NO: 1207 - protein, 514 aa, synthetic construct
  REGION 1..514: note = Synthetic
KKDNIQLSYNFKLRSLSKQEYKTLRYLARASKNLYNVILYYQKKSNELINRLNEDRENKLTNIEVLQISQDKFDSKKSQQEMEDEDFIYKCWYNKLIKFSSEKLKENFYPHIPAYTLDKFLNNTNVFLLPSQSVQILTQTVEQNLISYYKSGNKDKKYPNYLKKDSYFQVGYHTLSAASFKKNKIKIPLSTSDCYKHYSRKHKLSKEIYVDFPTYFLDLKNIIKINQIRIIPRQNAKYFELSIIYTIKKDPKDVNSKEYLSIDLGVNNFASCTSTIGSPFIINGRKIKSYNQWYNKEIARLKTSLDTQRNKVSNIPKVSKKMFQIIDKRNNRIKDFNNKSTRYIINYCIENKIGNIIVGYNKGQKQSVNIGKANNQNFVQIPFYKFRNKLKYLCERYGIRYIEQEESYTSKASFLSDNNIPKYKDIPKKGSIERIQMGFNPDKFANNTNFSGSRITRGQYKDYNYNIIVNADINASCNILSKANKENNLGISEDKIQQLKEILKENNIKKVKIA

SEQ ID NO: 1208 - protein, 402 aa, synthetic construct
  REGION 1..402: note = Synthetic
TQKNHIRCDKKTYKILRKLCHFSKNLYNFALYHIRQHYFQTHKHLRYESVYHIAKGNENYMLLPSQVAQQTLISVDESFKSFLSLLKAKKEGKVKEKVLMPRYLPKDGMYQIVFPKDQFKIEDRKVRLSLGRSFSKEFGVRYLYFDLPKNIAGKKIKEVRIIPRYHGKWFEIEYVYEEKEQDCKLDKSRILAIDLGLNNFAALTDTIGTAFLIEGRFLKSVNRWYNKEKARLQSVYSKQGIKYGSKLAQISLKRQHIVENFLNQAVNVVVKHCLENKIGIVVVGNMKEIKKEIELGKVNNQNFVGIPYKRFKQKLEAKCRLYGIEYVEVEESYTSQRCSRCGVVDKSNRKHRGLYVCKKCGNVLNADINGAINILLKVAGESAIKQIISSGCVNHPVRIRVA

SEQ ID NO: 1209 - protein, 401 aa, synthetic construct
  REGION 1..401: note = Synthetic
SQKTQLRHLSKTEFQLLRHLTHTAKSVYNEMLYTMTNYYDVYNEFLTYTDTCFMVKNLENYKKLPSQVGQQVLKVLDKNWASYFRLLRERKRGNYNRPISEPHYLPKDGHFVCIFQKQSFSLKENTVRLSLGKWCKKHFGMDFFTIPIPENVIGKPIKECRLLPRQHGRFFALEFVYEVPEQHPVVDPQKIMAIDIGLDNFATCTTSDRASFILEGRGLKAYNQLWNKRKAQLQSQYDRQGITFGKKTAILNHDRDNKMRNAMSQYVNHLIKHCIEHQIGQIVIGELKEIKQHGHLGKKNNQHFQSMPYGLFRAKLKSKCELYGIQYVLVNEAYTSQTCCRCGNVDKKSRIHRGLYVCRKCGVTINADQNGSINIGNKVAPNFTEGSSGTLNAPERVRLLI

SEQ ID NO: 1210 - protein, 402 aa, synthetic construct
  REGION 1..402: note = Synthetic
VLRIVLRNLSKQQYQTLERLTYFSKNTYNNMLYALRNDLLDNKGSLETKLYRYARSRDDGRMLYSQSVQKMAKDIIITLKNNGKHALKYHPKDGHRSVVWKNQSLKLKNNVLRLPLTKDFVQRYSLFSKWLEFKVPTWLKGYKIVEAIIIPKLNAKYFELHVIYKVSQTHVQTSSSKIMGIDLGVDNFATVVISDGTAVIIDGRKAKSINRWYNKEKARLQSIYTKQGIKTGKKFIVLSKRRYNWMFNFVHQAAAQVIKIAIKHNVSKIAIGTNKNWKKKVNIGKQNNQNFVMLPHSWFKNVLKHKAALCGIEVIETDEAYTSKADALALEPIRKQETYLGKRKHRGLYISSTGVAINADVNGAINIARKAFGDESWKSIPESLLGIGGRGRLTRPLRIRVV

SEQ ID NO: 1211 - protein, 459 aa, synthetic construct
  REGION 1..459: note = Synthetic
VKKNHLRGLTKEQYRFLRLLCRRSRAIYNMAMYTTKQHYASCGEFIGNVEVWNKIKHTQCYKNIPTDLSNQTMKVVERAYRSFFGLLHKRRDGHYNRPVNEPWYQPKKGMFMLIFPIRAGRGNKALNINVPKQYQKDFSFKRLSIPRPDYTQGKELKEIRILPRLKGGYFEIEWVYEEDPQPQQLDSTRSLGIDPGVNNFATCVDSKSGRSFILDGRQLKSYNRYVNKQSAHKQSVHDKIGLKTSKNKKRLWMKRNNILNNALNQYVNVIVQYCLLNKVGNIVMGQGYMAQEGVNHGAKSNQNFVNLPFGKFCLKLKSKCEMYGITYESVEESYTSKCDHLANEPMKHHEEYLGRRVKRGLFKSSTGVVLNADVNGALGILLKSKRDVDLGQLTVSGCLTQPSRIRLADVQVGSAKSVANRLSSSRLWCAKPQPAGSSGVKEASVSERPSTTTGLPCGT

SEQ ID NO: 1212 - protein, 314 aa, synthetic construct
  REGION 1..314: note = Synthetic
IYISHHNIYIIAYVIFTRLLRIPPCIKPHQIREVTILPVHGGNAYKIEFCYKVPAKPQNLDPAQYLAIDLGLNNFATMVDTATGAAVILDGKRIKSINRWYNKENARLQSIKDKQGITGITKRQARLLKKRDCQITEAMNRYVTWIANYVLQHRIGTVVLPRWDGIKDKIRHGRRGNQNFVQIPFHKFRQKLKSTCEMYGIRFDDSHSEAYTSQVDALALDPIRKPPYGRKRRIKRGLYRSALGTLINADVNGALNHLRKVAGDSVVPRIIGRGRVNRPVRIRTSFEPSTFAPIKLQPCAPQGAPLQAPGFNRG

SEQ ID NO: 1213 - protein, 484 aa, synthetic construct
  REGION 1..484: note = Synthetic
RVVSNYLHLPRKTFQILDTLAYHAKSMYNVGLYNVRQHYATHQENTQILQGIRPDLTSGVDILVGSYLPFTRKKDFPYKACSNYAQSKPNENFGLLHNDNAQQTLRSVEEAYKSYFELLKLYRTGQLEYCPSPPHYLPKDGRFKLAFPRAHLTIRNGSVTLGMSLTFRKQHGLTGKELTFPIPPCIKPHQIREVAILPVNGGKAYKIEFCYTVPNQPQNLDPNQYLAIDLGLTNFATMVDTATGAAVILDGKRIKSINRWYNKENARLQSIKDKQKIGGITKRQARLLKKRDCRIGEAMNRYAVWIVNYALQHRIGTVILPRWDGIKDKINHGKRGNQNFVQVPYPKFRQKLKSKCELFGIRFDDTHSEAYTSQVDALNLDPIRKPPYGRTRRVKRGLYQSARDTLINADVNGALNHLRKVARDSSTEGSVSTARCDSVVPRIIGRGRVNRPVRIRTSFEPSTFAHIKVQPCAPQGAPAASPLR

SEQ ID NO: 1214 - protein, 427 aa, synthetic construct
  REGION 1..427: note = Synthetic
TTKNYLRMNKQQYWIVDTLSKLSKNLYNVGVYNVRQYYFYNNKFLPYTNNYHYCKDNDNYSLLYSDNAQQILKIVDRTFKSYFRLLKERKKGNYNRPINTPGYLDKNGRFVLIYPAQRMSIKGRYFKLGMSREFKKQYGLNGDELTFKLPDHINPDELKEVRIVPKHDGKFYQMQYVYDKKLQDMNLDKNQYLSIDLGLDNFATFVETSTGTAEIIDGKHIKSINQFYNKEKARLQGVKDKQGMEHKFTKRLSRLTNKRDNKVDEFLNRSVDYIVKTCIDKDIGNIVIGELKEIKQEQNIGKKNNQNFQSIPYFLFKSKLQSKCDLYGINYIEEDESYTSKTDALSLEPIRKHEEYMGRRIKRGLFKSSTGQLLNADVNGALNILRKVVGDSIQRITDRGLVSRPERIRVTFEPEKRPAFSRIKLSV

SEQ ID NO: 1215 - protein, 452 aa, synthetic construct
  REGION 1..452: note = Synthetic
TQKDHLRLSKKEFEIIDRLCGYSKNLFNVTLYEVRKHYKNTEKHLKYKDAYHIVKSNENYKLLLSSCAQQTMKIVDRSYNGFFGLLKIDQNITVNPPKFLPKNGKFACVFPQTGFRIKGKKLLIGLSKTFRKVHQILAKDLEFIIPRNLRSVDSRQIKEIRIIPRLSGKYYDIEYIYKIKKKSMELELDSYQYLAIDLGLNNFATTIDTTNGTSEIIDGRYIKSINQWYNKEKARLQSIKDKQKIKFLTNREALMLQNRDNKINEFLNLSVNHIIKHCLNNKIGNLVLGDFHGIKQKIRLGKKTNQNFVQIPFFKFKQKLKSKCELHGIKYYIQEESYTSKCDALALEPIEKQVSYLGKRIKRGLFKSSTGVLLNADTNGVLNILRKVAGDSSIQGIISRGLVNRPRRIRLAFHTNIENDLQTSSVLNCSVVAKVSNPLKTIYKPRPSGRGS

SEQ ID NO: 1216 - protein, 382 aa, synthetic construct
  REGION 1..382: note = Synthetic
LKHNEHYRSLVQCGQCVLRAVDASFKSFFALIRLKKDGKDLGKVKLPGYLEKDNLYPVIFQSQMFRIIDSKIRLSMTRYFKERNHIGKKFLWFDLPKHIDPNSVKEIKIVPHYKGLYFTIHITYKKEVTDTDVDKNNILGIDLGVNNFAACIDNLGSAFLLDGKYIKSINQGYNKIVARLKSILDKSKGCPKYSKRLYRITTKRNNRIEEVMRQYVSFIVKYCLERKIGTVVIGDLRHAQNSCNMGKKSNQSFVQIPYGKFTSKLKSKCELFGIDVDIASEQYTSKCSALDSEPLKKQESYCGKRISRGLFKTKLGYLVNADINGAANIVRKFLTKSKQNLETFSFQRLFRGLVNRPVRIRYHQIVGGTNFSPSLGACLQGS

SEQ ID NO: 1217 - protein, 467 aa, synthetic construct
  REGION 1..467: note = Synthetic
LVEKRVCQSWLNALSNQEYSFLEKLSLHSSLMYNFSFYQIRQFFFKNRDIYKETGSFGENLQFKENYHICKLNENFSILQNACSQQVVQLAHRDFNSFFCLLKKKAKGEYSPDVKLPKYKKKNGETVLSNIVIQGKGVLLDKKKSALYNDVNVYSINSSKKFKELYPITETAHKFEFFVPKSINKIDEIRIIPYGKAPVKFKLEVVYSVQIEAKKADNQNYLSIDPGLNNLAACFNSQNGASFIFDGKYLKSINSFYNKNASKLQSKIDKNRNANLEFNFLIRKKNKLTHKRNNKINDYFHRVTKYIVEYCVKHDINKIIVGENKGQKKDINIGKINNQNFVFIPHAKFKNILEYKAKSKGIELIREEESYTSKTSFIDLEPMKHQETYLGRRTKRGIFKTKEGILINSDINGAANILRKYLTRIGKFEIWRDLYFKEAIKGIVNYPIKLNLDSLLFEFGFKKINAR

SEQ ID NO: 1218 - protein, 402 aa, synthetic construct
  REGION 1..402: note = Synthetic
SQHIRKLNKKQFLVLRELCRHSNSLYNCAVYCIRHHFNQTNSYIGYAKLYHELKVNEHYLAMPSKMAQQTLRLADKDMRSFFALLNRKRKGEYGADVRIPRYKKANSFFNLILPNDQVSLRNGMLKLTRDIKLPFTHDIKGTIKQIIISPHMEGKRFSMCLQYEEATTLPLAINKNNFLSIDLGINNLIACASNVGPSFLLNGRPLKSYNQFYNKRISEMKSELEKTTKKKWSMSMERLSLKRQRWINNYFNQSIALLMKYCLKHEIGMVIIGYNAEWKQEVNLGKTNNQKFCSIPHFLFKRKLQDKCANLGIEFIQQEESYTSKASFLNGDPMKNGSEFSGKRIKRGLYCSKDGRIINADINGALNIARKVFPEFSDEGIEALIVEPVKLNINSQNLVFVQ

SEQ ID NO: 1219 - protein, 418 aa, synthetic construct
  REGION 1..418: note = Synthetic
TQKNRLKLSSTKLEIVKQLAYYSARLYNVALYSVRQYYFNNNAYLNYAKNYHECKGNENYKLLLSDTSQQILRIVDRNFKSFFGLLKLKSQGKYTEKIRIPHYKKEDELMNITIQGRSARIRKGYVIIGLSKAFREKHQPPFKELKFKLPKNITVDKLQEVRILPVFNGLEFDIEFVYKKEFEPISVDKNNYLSIDMGLDNFATCYDSNDGSSFIIDGRYIKSINRHYNKQKAYYQSILDRQNIKVSKKMLNLSRKRYNKINNYFNLAVKYITDYTISKNIGSIVIGDFSDIKQNINIGKKNNQNFVNIPYGIFKRKLQSKCEQLGIEYNLQEESYSSKCSFLDKEPIKKHDTYKGKRVKRGLFRTSQGYLINADTNGAANILVKFLTSNGQLQHLVIANRYGCVNHPPRLKLNDLVA

SEQ ID NO: 1220 - protein, 441 aa, synthetic construct
  REGION 1..441: note = Synthetic
TTKIQLMQNNKDNINLDILYKLAYHNARLYNVGLYNVRQHFFNTNSYLSYFSNHTECQTNENYALLLTDCAQQTLRLVDRDMNSFFKLLKAKKYGKHSFPVHLPKYKDKEGIMPFAIQGRSCRIQKNGTVAIGLTKEFRDLYGITERRFLITIPRNLRNIPVFKEMRFIPRYGGKEFQVEFVYDSNYIQTPQIDGSKTDGYMSIDLGVTNLFACTTFSNGGASQFIIDGRTIKAINHYYNKAKARLQEEYSHNKSINGMNTKRFIRLSKSRLNKIDAYFNESVKYLISKCFALGISTIVVGYNKGWKQEVETGKKNNQKFVSIPYHRFRQKLSYKCELYGITCVFQEESYTSKASSIDMDEIPVYSEDDGVKYTFSGKRVKRGLYKSKDGLLLNADINGSVNILRKYLNECNAKALCADAVRALVNVPCQRINVLCTSPSL

SEQ ID NO: 1221 - protein, 420 aa, synthetic construct
  REGION 1..420: note = Synthetic
TQKNKIRGLSKIEFKILKRMCHESKALYNTSLYYINNYFDINDEYLGYDEMAFILKTNEHYKMLYAACSQQILKVVDREFRSFFHVIKERKKGNYNRVVKTPKYLPKDSLFLLIYPSQKLKINDGKMFIPLSKKMRKETCKKGITIKVPNYITTEMLCEVRIAYRYNHFEIEFIYEKQEKYYKFDENKILTIDVGLDNLLTNVDCISGRSFIIDGRELKSYNRWYNKRVAKYQSIVNKQNITKRTKWLKALDGKRYWFINDYLNQCVNKIIKYCLENKIGTIVIGENKEWKQGINIGKRNNQNFMSIPHGILKYKIKCKCEFHGIKYITQEESYTSKCSFLDDESIEKHEYYLGKRITRGLFKSSEGILLNADVNGALNICRKSKQKINNNNQLCIGLSSSPVRVRVHSIPSRTKNYVIY

SEQ ID NO: 1222 - protein, 455 aa, synthetic construct
  REGION 1..455: note = Synthetic
HLRFRIGIAVTSSVSETALRLRTRSRSLANLSKIQAGKTPSSTSNAGRRPSSAVGRGYARRHQPPNTLNQVRQHYFDNGEYLNYYDAYDQLKNNWNYEVLPSQVAQQTMKQVDRGFKSFFNLVEKKRENKYDADVSPPSYLPKDGFYTLEYPSQSFQVKDDHIRLGVPRAYRDEFECDLTEIQIPFTYDEVRDANIKRVQILPKADAQYFECRVLYEQDIEEVETIDGSWLGIDLGVDNLATCVDHRGHSFIVDGRHLKSQNRWFNKRLAHYQSIKDKQGIEGTTRRLERLHQKRRYVVTDYLNKTVRTITDYCIKNSIETVYVGDGKGWKQNVNLGDRTNQNFVQIPFDKLKQKLKHKLEARGIAFELVPESHTSKCSFYDEEAIEHHDEYIGKRVERGLFEASNRTRYNADVNGAVNMARKATGKPNSDLFKSEKGVERAVDAPRRISLSDMA

SEQ ID NO: 1223 - protein, 442 aa, synthetic construct
  REGION 1..442: note = Synthetic
SLRQNLRGLTKQEYEILKKMSHKSKDLYNETLYEVRQYFFNNGEYLSYYDAYERLKGESENYRVLPSQMAQQTMKHVDKAFKSFFNLIKKKREGKYDAEAHPPNYLEKDGHFSLIYPNQSFQVKENHIRIGVPKNFREKYGYTKKEIQIDFTYEKLKQSHIDIKQLHIIPRAKAQYFEYRIIYEEEKKPVETKEGTWLSIDLGLDNLATCVDHLGRSFILDGRLLKSYNKWWNKEVDKLQSIKDKQGIEGNTRRINKLFRDRNNYVHDYLNKATKAIVNYCKENKIEKVFCGDGKGWKRGINLGGSNNEKFVQISFDKFKQKLKHKLEFYDIEFELVDESYTSKCSFFDSESIEHHEEYVGSRVERGLFKTSDGVLINADVNGALNIAKKGLKEIDMGKPETSGVGSSGVVDTPRRIRKPFRLGYGSNISESLIQTSPEPPT

SEQ ID NO: 1224 - protein, 411 aa, synthetic construct
  REGION 1..411: note = Synthetic
TQSNQIKNMNKDTYNLLRRLCWHSARLYNYGLYTVRQNYFETKTYLPYVQNYHYCKTNENFKVLPAAVAQQTLKVVDRSFKSLFGLLNAKKHSKYQSRVSIPHYLPKDGYFQVMIPNNGFQIKGNEINIGISRFLKEDTGIKNIVLDFPTQINAKDVIEVRIIPQQKAHYFKMEVVYEVKEQELKLEHKNVLSIDIGLNNLATCFDTKNNRAFILDGRHLKSINYYWNKQNSKLQSIKDKQNIKNYTRRQFLLKRKRENRIKDIIRKSSKYISDYCIKNNIGNIIVGHNKGWKQDINLGRVNNQKFVQVPFGYMMSSLESKCEEFGMKYSEIQESHTSLCSALDNEEVKHHDVYMGKRIYRGLFRSREGKLVNADVNGALNIARKSKVTAMEVTSEQVMGIVAYPVRIRVF

SEQ ID NO: 1225 - protein, 440 aa, synthetic construct
  REGION 1..440: note = Synthetic
TSVTNLKLTQEQFEVIDTMSYRAKALYNSAIYETNKYFEQKEEYIGYQQLDQHLRNLADIEENLSYRALPAQLSQQIIKKFDKNYKSFFSLLKMKQSNEYNKSIDTPKYKGKDDRKELIFAKSKSGQAFIFKDECIFITVTKDLHKGRMKLCKIPEYLKELDFDEEIKYMEIIPKLGSYSLHIVYLKEEKEISPEAKNWFSIDLGLNNLCTVTSNKTNSFIMNGRHIKSINQKYNKRIAKLKSAIKKSQSKSTSKELNRLYSTRGNKLNNEIHKITDFIVQSVIEHKIDFVVIGYNKGWKQNINIGKRNNQNFVQIPFSKILQHLEYKLRLLGIEVILQEESYTSKCSYFDNEEVKKHQTYKGKRINRGLFKTSNGMLINADVNGSLNIFKKCVIKVLKAQEVHDALLEPVDTGLVMNPLKIQIRTSTSLTEISALIQSL

SEQ ID NO: 1226 - protein, 454 aa, synthetic construct
  REGION 1..454: note = Synthetic
TSKTSLKLSKQYRNILDELCFYSKNIYNSTLYEIRKHFFETGKYLQNEKVYHIIKKNENYKLLPAQVAQQTTHIVDRNMKSFFGLLKLKQKGLYQEKVQLPKYKNKINGRFALIYTPDLFKVDYEKRKLRLSLPKSLKERFGLRFLFFDFPKYIKHGTKIKEIRILPKTYNFEMEIVYINDEQYQQIENYDNFISIDLGVNNLLTIYDEKNHKSFIIDGKQMKSYNQYFNKEIAKRQSSAVKANKKHKTKKIVRLQSKRKNKLRNDLHLISGRIVKFCVENDIGNIVVGYNQEWKQNSNMGRKNNQKFQNIPFAQLINFIDYKSENHGIRVFLQEESYTSKCSALDLEIIEKKEEYLGKRIKRGLFRSANGKAINADLNGSLNILRKFLVENRYKKVDTSKAEFCLSNLEDRIGNRGAVPAPKRIRVAELEKFNFDDQTSLEEKVEFIKNVVNF

SEQ ID NO: 1227 - protein, 644 aa, synthetic construct
  REGION 1..644: note = Synthetic
SVKLKTITFNITDKHTRKIFNGMTKISKNIYNTTIFNITIFNKYKQTIFKKIYDELSSLQIDEKNKYDIHKRIYELYDINYKEYVNNIPIIKNNSKIIYKFITECCDTSYIINDFYKVIKYLVEYNIFKNNEIIYNDQNKYEVVDSIIEKILQSIYNKNYYRTYYQLINKEPITLQNEIFINQVKNNEKLFDTKLKIDWKKKIENVYKLKICSDNNIIGRVVYSHLNDDNGQLPSDLIINIVQKAYKGYTSFYVLKDKGIKCNMPKYIPKDGSYILPYYPRSFKIIGKDIRLTVGENISKNYLNIIKDDKLVCLNSNDKSDYKYYVSKNKMKLITKKKVSKQKNYIVNNKYIDKNNKHIINAYYVNIKIPEYIKDKDIKLIEIKPIYENYSYKICMTYEEKNETKEVKSLHMVKDSISIDLGMANLMSIYDPTGIQYLLKGGYLIWLNKKYNNLIDMLKSKAKKCNNLNTTKQIRKLLIERENNINNYFNNIVKWISTTYKDKTLVIIGYNKRWKDRIDLGRNVNRKFYQIPYCRLLDKLNDKLNGMGIKVSYNEESYTSKCDALSLEEIGKKIAYNGKRIKRGLFSSSSKKLINADINGAINIMRKYYKKNGEEITEISGTRICNPKSVKIPCEVDKPAGKGN

SEQ ID NO: 1228 - protein, 642 aa, synthetic construct
  REGION 1..642: note = Synthetic
SKITIKKTLVIKNAMTDYNHKIFNHMTKVSKNVYNCVIYCFSIFLKYKDAIYRRLNALIVQFRNRKKLSGEIIDKWFYDIFESYYNNYSEICTIKKHNNEIIYKYIIDKIENDNIYIDNDNLDDFRKTVYNDLSNLEDLKHEHTDETIIEVVDNILKSIYIKNWYDVQHKLKNNIPINGVSEQFIEDVKNKKFLFKSKVKIDYKKKINKIISKEIDCKLKSNQNYVTRIAYKHLHDNSEMLPSDIIVNIMNKAFENIKAYYQLKANGIKCNLPKYLQKDSKFNLYFTYRSFKENNKDVRLTIGKYVSENYIDITGNNSVVCVNPTANTVYKKYAPKTACIDTNCKRFPKTTNFIIGTKYISKKHNKIFDAYYMNIPKPPNPPKINGQNMKLQLIEVKPIYEGHKYDIHYKYSIETNEPIRENEQGSVEDFISIDLGIGNLMTIYNPTGEQQIVSGKYLVWLNKKYNHLIDEAKQKAQRINGSYTTKKIRNMLINRENKINDHFNRIVKWLENNYKEKKIIIGYNLNWKSKVNMGRKTNRRFYEIPYSKLLKKIKDKFRSNLILNEESYTSKCDGLALADIKKKDNYLGKRIRRGLYQSSVGKLINADLNGAINIMRKCLKKKEINMDRIFGNSIFNPKKAKI

SEQ ID NO: 1229 - protein, 641 aa, synthetic construct
  REGION 1..641: note = Synthetic
DSDGCEENYLCIADYVTNSTINEQLSLKDYNNIFDFMTNISKNVYNTVIFFNDVYYKFKNRMFKNILHLFFIHNTQKITEENIQAQIYYQYDLFYKLYVSSKKNSYNNNKILYPYIKDYICKHNITLMNNNYNHYKNNIIKNIIKEFKFSYSDDNIKHIELISVVETILRSFYNKNWNNTLNEIKNKLPCTINNAEFINQIKKNDKLKNNNNYKEQFNEYAELYKIKGTSDRNIISRFVYKNLGNNKNYLPSNVITEIINKSFNGFILYFSNKEKGIKCSTPKYLKKNDKYSLVYSPQSFKIIGKYVRLTVGEHISKNLNSIVKNKYVLLNENEKTYYKMYVKKKHMKTIDKNTKVPITKNYIVNDNYIDKYDKNIIDGYYLNIRLPKKVHKKSIKNIEINSIQNGLKYKISYSYKHMATTKEEKEITEKNSISIDLGMVNLFSIYDPTGEAKIIKGNQLISLNKFYNKKIDKAHSIAKKANDKEITKKIQKMEINRKNKIDDYFDKIVAWIEKEYSHKENIIIGYNKGWKTNVNLGRKMNRKFYNIPYSRLLKKLKNKFGNRIKITEESYTSKCDALGLEEIKYHDEYLGKRVQRGLFSSSKNKLLNADINGAINIMRKKISLDEIKGEIQNPKVVRLFR

SEQ ID NO: 1230 - protein, 667 aa, synthetic construct
  REGION 1..667: note = Synthetic
SEISIEDTVKKKTFSIQLNKKSYINNIFKHLSSITKNIFNTTIYITNIYYKHKNDIFENSYEKYNDLVEKTDLAFYEILKNEIKFFYDVHSDKSSICNINHKFIMNYIIKNYNGILLNNTNFYPIENKIIDELKDIIVFSNKYEFNDIIRQILKNRYDGQYYSLQKKMLSRIPFVIEDDILIDNVRNNEYLFVYKEQFKQQIKLDNKIKSDDNILKQFIYENLGNNYDRIPSDIICNTINKAQNTFASYWSKRRKGMFANKPNYIKDSVFVVPYFERSFIIKNNKVRLTVGKYVAANYNTITNNNLICLNKEEKTEYKKYVDEKYLITTDKNKKIPKNKNYIIDNKTERKYIDKNDENIVNGYYVYIDIPKKICDKTIKMIEICPLYDGYRYKINFTYDTDKKIEDEKLEIIEKKINCNPNDALSIDLGMGNLMAIYDPSGYQFLIKGTYLISLNKKFNKKIDELNKKISKTTSVDEKEKLRKIKQTLLLKRENKINDHFNKIVKFMENKYINKKVIVIGYNINWKQRVNLGKTTNRKFYEIPYSNLLKKIKDKFGNKIIITEESYTSKCDALSFEKICKKEKYSGKRIVRGLFSSEKKKLINADLNGAINIMRKKIELKEIQGKSIYNPITIKMFRNGTLSQSREVIITSEGKAIMELSTTVIKLI

SEQ ID NO: 1231 - protein, 712 aa, synthetic construct
  REGION 1..712: note = Synthetic
KKLKPDKSEQKDPVYVRTISSVVNTKIPIRNKVFDFMANESKKIYNTTLFHTNIFLRYQNLIFKDLLDLVNNNEILDIKQFDKMFYTIYGKYHNNFLIIKDALDNNNRIIYNHIKEYLNEHKLQITNDNYNKIYDIMIIQITNLNTFTVVNKNDMDELFFNLVQNILKSIYTKNFNEFKRCIINNIPCPNDDESFITQVKNEEYLFSKDAAKNYKKILMNHPLFISKKKDKNNENDEEDEIPCKKEETIKSNQNYIARIVYEYYTDCKIPSDLMCNIIAKGHAAFCSYFALLEKGIYAKKPSYLGKDARYILPFFIHSRKLINVDGNDHYRLTAGKFVANNFVDIIGDPDYKCLNFFDKTEYKKYAHVLDLKFSSNLKKIPKGQNYIIETKTNKGYYINKKSDRVIDSYYVFINKPPKSEMDKLVLIEVNPIYDGKWYKINFTYKTEANTNNPDPNKKLSIDFGIINLMTIYDPHGEPKIIKGAHITNMNKFYNNLTDKCKSGIAKQDPKFTSDGLKKLLLKRHHSIDNYLNNLVKWFVTTYKDYATIIVGYNTGWKKKVNMGKKMNRKFYEIPYMKLVYKLRDKLAMSNQKLEITNESYTSKCDALAFERVGFHETYNGKRFKRGLFSSHPKQIYSSVKNKMIKVTKKGILLNADVNGAINIMRKWEEKNGKIMKKITGINICNPRVIKLKDYVNIKNSQKSEQMVTQVLI

SEQ ID NO: 1232 - protein, 615 aa, synthetic construct
  REGION 1..615: note = Synthetic
KKEPDPNILLKTIKSKFSVDNFHSELLDEHLFQTKNVYNSYIFYANIYHKYKYLLIEQYDQKKEFYLYCDDFIKHYLFNLDDMKIINQDITDICKDILENNIVTTKNCLDFYNLILNNIYNYDTKDLITKEIVYRNISNVYYKNFYMLLKEKKMNGKKSNFQFSIANDDLIDDVNNKNHINIFTCSKEDNNVDTSDSTIIKRITREHLNTDTKALHCDTRTIAFDKATSSFGSYWTLKSKGINANKPNYLGKKDKFILSFNSDRNITVNNNILTLRLGLNSNDILTNKDYIIVKKGICINKIYILKNENKRKDKNLNYYFMYNNEQYYIKKDNKNIHNYEFLDIKIIKKLENKIIRQVEIKKNQLVKNNYVICYTYECHKQEINLEEIKPVSIDLGMKYLFSIYDYDKTPTLLDGKHINYINYHYNDLIDKYKSILKKTNNKNTSYHLKCLNKNRSNKLNSCMNNIVSWFMERYDDCNRLIVGYNKNWKTKVNMGKTNNRKFYEIPYRTLLNKLKSSWEKKGKVYVEINESYTSKCDSLSLENIGRNKEYLGNRNKRGLFKSNTGKELHADINAAINIMRKWYDKVGEMFELKNIKKVNNCFKQSIYKLSSLQLS

SEQ ID NO: 1233 - protein, 658 aa, synthetic construct
  REGION 1..658: note = Synthetic
KKKTKIKKKNTKIKKSTITMNHFFNNNISKIIDELGKTSKNTFNHYLFCYKYFLLYKNKVYDEVFIDTVKNKTFDKDIINNLIDVKFKTYFDLFQKDFNKYVLNNDILYQHIKNLKLDIDNVNFMNTYTNLIANCILVDKIDISSPNLLFLYEENIYSILYGFYYYKYCDVKNGLINKKPISVAFDDNFKKHVMKTEKPIKFITVTNKKDILNNYLKYKDQNKDEDKEDNNLQSEQNIIGKLVYSTIKFKKTSSDIINNTMNKTYQAIKSYYALKELGKKASKPKYIKEQFYSIIFCGKTIKDFIDKKKNKENNEENNKENKNDNINMNNNTAKKIKNKDKIKLSYGKDIKHNWFEYFNEELESSTPLLLIRKPSILKDKNIKLKQIEIIKVAKNIYKVHYKFDKEKTEIKDENSVKLSEIASIDLGMVNLMTIHDPSGKQRILKGGHLICINEYYNKKIAETQSKRDKEINEKRKEYFDNEMKLLNDMRLRKLKGKMNEIVSKLKELYSHKKLIVIGYNEGWKNKVNMGNKNNRKFYEIPYAKLISKMQNAFEATTKIEVINESYTSICDALGNEEVKKHDMYKGNRIKRGLFSSSVGKLINADLNGAINILRKYAENKYNKIKGEGLCNPERIKLTNKSKMNLTKSQDQQVIHKSV

SEQ ID NO: 1234 - protein, 567 aa, synthetic construct
  REGION 1..567: note = Synthetic
IIKRTMSSWLNLDNEENKLIGSISHESKNVFNHYNFCCKLFNEYKRVIYKKLLKHKSFDVNEDILNELAEYYKIRTSNFEAIKNNSQLIYEYIREQNINVYNYNFEELYKKYKQECKLIENIIIPAKHRHMVYFDLIYNILKSRYFRNYYKSRFEMLNKIPLTITDKIFIDHVKSKTTIFDGKNYCDLLKRKYETKENKVTSQQNLIKRFAYKTLTNCKLTGDLICNIMNKCYSAYASFNALKEKGLRVGQIKYLPKDGHYVIPIFSHGFLIEENKIRISIGKEIATEFENVSSVKKKFMYLDLPNYFLNNEACKIKLIEISPKYDGYRYKINIVYDEIITSRVIKPILNKDNFASFDIGVTNLITAYDPLSVQRIIKGSNLTSSNHYFNWKIDKAKSELPSNKGTSKKIRNLLIKRDNVLNSKMNNIVDELYKTYKHKEKIIIGYNEGWKQNVQMGHEMNRKFYDIPFDKLIKKLENKFKGNVVERIKEPYTSKTDALSLENICYHDNYNGKRIHRGLYQSKDKRIINADLNGAINIMRLYCKKEKVAFNQVTGIYLFNPRIMHIK

SEQ ID NO: 1235 - protein, 660 aa, synthetic construct
  REGION 1..660: note = Synthetic
KRNKLIRCFSSYITSKNEILHKTLDFLTTQSKNIYNHYIYCYNIFTKYKKLIFQDLQKFKNDKSINENFIAITEKYYKFHCDNKIIYEKNNEIIYSYIKSKKYIVDNENIKKIYKEIKNELKKYKEIKLNNNPVFFTDIIRDIIFSFYKKNFYVVKDCLIHNKPYDNKKYTKKFIEHVKNNNPLELDIIEFVNFKKNFSKLKTKQNLIRRFAYNIIKKNLTLSSDLTINIMDRAYNSILSFYKLKEKGITANFPKYLEKEAKFILPFYIRSFKIEDNGDNKNKNKKNNKNKNKNNKNNKGKIFMRLSIGSYFKKNIKDILGKNIIIDKNKFYEKNNKNKLYDSDYLRFNICDNFKNKLITEENKIDYKRIKLVEISSQYHGNKFKINYSYEKNKKNNVKNKKGDISIDLGMKNLMTIYDPEGKQKIIKGGKLIWINNKFTYKMGNMQSEIDKSKNKEIIEKLKKKKNELYIKRENRLNNEFNLITKTLFGIYERKERIIIGYNEGWKQGVNMGKKNNGKFYKIPYFKLINKIKDKGKELGIEIKITEESYTSKCDALSLETICKHEKYLGERIKRGLFSSAKGKTIKKGKIEKKGTLINADLNGAINIMRKINKNLKEIKGKNLCNPEIIKIGTKNKKKSKVTHPINHPMKSSDQSAKTK

SEQ ID NO: 1236 - protein, 656 aa, synthetic construct
  REGION 1..656: note = Synthetic
KDILTFDQPKISDYKCFTYYDNDQFHHKIFNELGKISKNIYNLSIYSIQIFNLFKIKLYENLYNELKKNNKINTSEFVKNKLIEYFELYSSIKDKLQNNNSYIYKFIINYITTNKIIIKNSNYENTKNYLFNILKKDVNIYLDGNNNYLLFDNIIIRIINSLYIKNHKIIEDEMLAHKKYSFNDDEIIQTIKDKKIMDFTINTSYKEKIENELKIELKSDQNYIGRLVYAKLDNNHHKLETTMICSIITKAYQSYTSFYALRNKGIKANQPKFLKKNDLYNLIYAYSKTNKLDQNNINAYTSTFMAKHFDEIFGSNFIKLSNNKYIDCKYLLNTNSKKILKKDNYIYKDKYVSKDNKNIIDSRYVKIYIPDKLKKYNIKVIEIVFENESIKICISYENNEKIDEKKIQIQSDESISIDMGVKNLMTIYDPTGTQKIIDGKYISSINIFYNKKIGDMQSVNNNIMVNKLNLKRKNTINNYFNLIAKWIATEYHHKKLIIIGYNKEWKQNSNLWGKNTNMIFNKIPYCKLIDKIKNKFIQQDKIVLTNEESYTSICDALSLEEICKHKNYLGNRTERGLFVSAKNKKINADINGAMNIMRKIFKNMKEIKGKKLCSPERINIFRDVINQRIRCNSGTTTSVVIGKNIDSLTVFNTFSH

SEQ ID NO: 1237 - protein, 641 aa, synthetic construct
  REGION 1..641: note = Synthetic
FQDSTSKYKCLSYYSNNKYDDEIWSHLGSIGKNVYNISLFCKKSYDAFKDTLYKKLYDKLLKNNNFDVDEYIHDEVFNNHEQYAQINRHIKTNNDYIYKRIKYEITLTNLNITTDNVEQIINSYLWMLKKDPNIYVDDQNYNILYTNIITNIIFSFYKSSYRIIEECLLEHRKFPFICQDIIDDVRNKKQMYSLPNKPNYVNIIKREFKCDIKTDQNYVGRLVYKKLDSNYGKIDSTMIGTIIEKIYKSYSSFFAARKTNKLAQLPKYLYDDDKLTLNYVGNKCKLNKTENYIRVHTSKYLGKNLQIINPNYCNIAPNKFIHKKHMTLKKQFCKNKTAMNIKSTTKNSYFYDKFYVFKHDENIIDSNHIYVPYPKLLHDKEIKTIEIKFINGKIKYCVNYINKIVIEKKEVIVESTDSISVDLGVKNLMTIYDPTGEQHIIPGNFIVSTNYHYSHLIGKAQSNNNKKKINKLLIKRDNIINNHFNMIVKCLELKYSHKKMIIVGYNKQWKRKANLGKRNNLTFNKIPYLLLIKKMKDKFKDKDIIIKLNEESYTSKCDALANEPIKFQETYLGKRTKRGLFSSSKNKLINADINGAINIMRKVFTNYENTCERIFNPVRINICREVLHQRITGNSTPYKTE

SEQ ID NO: 1238 - protein, 594 aa, synthetic construct
  REGION 1..594: note = Synthetic
KYTITKYIDKKHLKIFKELCSNSKSVFNCCVYSYNIFSLYKNNIYSDMFEYYKKNNNKVDQKQIFQLYFKKYYDIYTNNKQLVKTNNSFIYNFIKNNKKYVNINTTNYNKIKSTLLTKLKNKVEYNDNNKYIVFEHIIEKILISFYYKRFFIIKRQIQNHQKLDELDIKYKDILDDVKNNKSLHNEDNNYDQIKTKINELLKEYNQKELYSQQYLFKMAVYDNHLGNIEKNILPADITLNIIDKYFESIDSYYASIKKGIKANKPKFKNKDDLNNLYYFPSSFKIINNCIRLSVGDYIGKNLSNYKNINKYKNKKYYYSKNIISKKEKGLIKVEEGYVNKKSLVDGQYIYIKLPKEGRLKCCIIKPFGDIMKILFIYEKIVRKPVYEKPTVENSISIDLGLKNLMTIYNPTGTQKIIKGGKLVSLNEFYIKKIGSCKKEDLYSLHEKRKNVIYGYINKLVSKIKELYANKKNIIIGYNEGWKNKINLGKDNNRKFCKIPFNKIINELKNRLSILNINIIKTEESYTSKCDALNLEKIGPKKKYDGIRTKRGLFISKTGKAINGDLNGAINIMRKVINLREIKGEKIYNPLKIDL

SEQ ID NO: 1239 - protein, 626 aa, synthetic construct
  REGION 1..626: note = Synthetic
HKKTVKLKTIKIISHNNFKNVFDIMTSISKNIYNCCVFTNNIFYIYQNIVYKEIYDYLFDNTNSKLTNEQKQYINDKNYMPLIISIFKGYYDMYSNNFQLMKDNNDLIYKHIKDKINKDNIILNNLNINTIRKTVIDELKYINYTLENKQIVFDDIIDRIIRSFYDKKYFLTRYQMLNHIKFTFNDEILIENIKNNEYYYDEKNISYKTKILKELNIKLKSNQYIFKKFVYENSLNNNADKLPADIILNIIDKYHEMITSYYGLLNRKIKANKPKYLHKNDKFNLFYYPSSFKLFDEKVRLTLGKHIAENIISNNNKITKINNRKYCYTNMIVDNKKFKHEKNKENYVKIKNGYINKRQIIDAYYINITLPKTLHNKNIKLIQIKPYGNKYFIYFTYETTQNMQQTKHKITTKNSISIDTGIKNLMTIYDPTGEQHIIKGSNIKSINEFYNKKIAGLQSYNKTKLDKNTFNRKYSLLIERKNKLDGEINRIIDLLLNTYMNKENIIIGYNEGWKTKVNLGSHTNRNFYSIPYSRIIYKLKEKLESNGKNLIIHEESYTSKCDSLTLENLTKRDNFNGDRIYRGLFISKIGKAINADLNGAINIMRKVINIKKITGEKIYNPTVIRA

SEQ ID NO: 1240 - protein, 668 aa, synthetic construct
  REGION 1..668: note = Synthetic
KPTVKIKTMTYYIKNNITKQILDWMTKISKNIYNTTLFIYKVYKIYQNDIYKNVYDYIIEKNLHINFINSPKKNKKDKKHIKYDKTAKKEEKHPDLVKIETFFYGVFDIYYKSYIKNKLIVDSNNKIIFKYIINDINKNNIVISNINYKQLIDKYLDNVIKLDNVNYNKSNKSITIDNIVKSIIKSLYCKNYFYVQKQMKNSIKIDNKFIDVINAIKNNNYIYEDDDENYRNKIINELNIEKLSSIENFISRITYKYIGDNKEKIPSDVIINIISKAYSNIKSYYNLLKSGKQANTKMCKYLGKDDKFNLFYYCRSYLKLEDGIRLNVGAYINNNFNTITNNNYKYIIVGNTKKYYNENNLINLDKKTLAKKKKKGIKYQKIVDKYINKEHLISYNYVYISLPKKIEFETIKLIEIKPEHGNIKICINYEKIYENEIKEYDMKAYEKLSVEKKLKLTTSIDTGVYNLLTIYNPTGEQHIIKGGILLSINHFYNKKIDRLNSINKKENDKSDYKRLHSLLKERENKINGFMDKVVEILVTKYKEKEVFIIGYNPNWKNKTNMGKKNNRNFYMIPYKKLIEKLEEKLKCINKKLLIVNESYTSKCDALALESLCAHEKYLGKREERGLFKSSTKEIINADLNGAINIMRKRIEMKEIKGEKLKNPSVIKL

SEQ ID NO: 1241 - protein, 700 aa, synthetic construct
  REGION 1..700: note = Synthetic
FSKNIFNSTIFFSNVFYKFKFNIFDEFISYLILNKIKFDFSNCPKHEITVKIKGKKVIKMVYDDNVIKQINDLKQKANQFIYDNFQFYIDLYLKILKYSKYNFRPMFHHISGYIDIDKITITSKNVDKIAADFIDDINVHGFGFKFDDNTFHECYVKVVYKVLNNIYRKQQLSKKLPIDDAFTDKINNIILTPVFNIVNNNLDKLLKKRDLKLTDQSIITNIVKHFNSEACGQLPYDMVHELIAKSFISYTSYYEALKVNPFARKPNYLDKENGRYILRLTRKSTNIIKKTYDDDGYLIKTEKYKPNSSNNEDTNVEYLIGVPTGKYVSKHYLSLTGDKKLVKIGENNRYGHVFYAKKKFIKIDKPDKVTKSFINKHYKYKNKYIAKDNSNIINGGMIYFNIAKEIVDKFTYMEISMDDNNNFKLNLSYSVNKINQPKNINKVASADLGGVNLMTVYSSHNESIIIPGGPIKSWNYFCNMKIDKLKSRKATGKKTIDRTIKYTKNGKNYTVKEEIDTKTLIRNLRTGRLNRINDYFNKIAKYMVDIYCKESDIDTFIIGLNEGWKNKINIGKKNNRDFSSIPHSRLIQKIKDKADLAGIKVIVREESYTSKCDALSLESVEKHQEYMGRRTKRGLFKSGTGKLLNADINGAINIMRKELESTNKTLKRMMNNEIKELVQETKKVVKYPRKINVWAELNNQ

SEQ ID NO: 1242 - protein, 448 aa, synthetic construct
  REGION 1..448: note = Synthetic
LTTINNLKPNKKESNYLKSQFKVATELHDDMMIDLFRSIHSYEQKLMDGLTKHFTMAYRNPLSKSPMKYIISDVTKKFQTYFHNVKQEPSCKPPNLNVYELNTLISKNFRFDTNSDKQLTPEALTYVENLKDNAFIKPPLCLKPNKKSAQLVFNKSYFTIFKQTIYFSNEADVFHNPLPFKVPLPFHLTFRDIHQIRISLELNQFKVYFLYNINLEHKSSEVDNNNFLAIDIGLKNFCTMVNNVNNQAIIIDGKPIKAYYHNFNYKVRNYKKKLKRLHQDTSTKKLANLYNKRKAFTTNYLHQVSSYIIKYCKKNNIKKIIFGYNKGMKEQLYKTTSKKGIFFQIPYSKLVNYLSYKCKLNHIEFIIQEESYTSKCDSLALEPLNFKKDYKGERVTRGLYKSSTGKLINADVNAAINIARKAIGKSLDPWVKELASSGVMSMPLRISV

SEQ ID NO: 1243 - protein, 426 aa, synthetic construct
  REGION 1..426: note = Synthetic
YKTTVNRIRPKNIQEYHLLQDITRASKDLYNTTLYETRQHYFNTRQFLEYKNAYHIIKNKQEYKELPSQAAQQTMKVIEREFKSFFRVLEEKKKGNYNRKISIPKYLDKDGYFTTIFPKAHIRFNKKDNTKAYLTLSKSMKNKYGIKGYEVSIPEHIDNDTIKELRITPRHNHFQLEIIYKVNDYPEIISNNNYLSIDLGVDNLVTMINNVNDQPIIINGGDIKSMNRYYNKKIGYYKSILKKNNNTYYSKKIDNLWLQRSNKFKDYFHKLSTNIVRYCVLNNIREIIIGYNKEWKQNINTGRKNNQNFVQIPYGLLIEYLDYKCKEKGIVFTLQEESYTSKCDALSLENVRKHNNYSGCRVKRGLFKSSTGFVINSDVNGSINIMRKCKHEEIDTWVQSLVSSGCVFQPVKLSLDKFTNLTLQNR

SEQ ID NO: 1244 - protein, 644 aa, synthetic construct
  REGION 1..644: note = Synthetic
LTIRIVQQASIEQLLTIAQPEQANQFYWPIVYKRILAYQIANSFNQKDQDLSLNKQTPMSFWTNQHALKVITFKANRNHVKKIVSGLTAPQYTYTLKRLSQCDKSLYWLCLQRKLATQVAKTAVSKLKMKSVKPTTNAEINLEWLLHSEKELIDLPSQYQQFIQNMKVALNYKISNRRTVVPEIWHLEETDCIPTSFIGGEIGDVYTRLFNKQVYQTLPSQAAQYATTNSINDAYKSYFTRAKLKHQNNKPPGYADKKGFKPVAWKKTTFRFKSRGSGKKRKAVVCLSLGQVKKGKEMLFKALANDEFSLKANVTSGTPTVTTKKYYRTKTAGAERCKYNSLELPISSDIYKKKQLVQLVRIVPKQNGNSFELHITIEKPKVKPKTTVSRIMSIDPGVVNVVAATTNVSSLRPWIVSGKEIVATNERFVSALREAYSQLKISQDKSTSKRISQLYQQRKNILKDIFHQLSRRIVNYAIQHGINKIVIGYNKNWKRRSRLGGSMNRIYNQIPFATLVKYIFHKGEEAGIIVVENEESYTSKCDALALESFDDCKRRTTNRRLVRGLYRSSIGHLVNADVNGALNIMRKHVLKAHPSLNTQIKDHIQSQHSVLLNPFKCSMKYLKSNYETDGLSYNLGFTSSALAA

SEQ ID NO: 1245 - protein, 251 aa, synthetic construct
  REGION 1..251: note = Synthetic
KLLHSIIVAVIYEQASNQNNLNLNAIANLGIGLDNLVIITSIQAKTQPLLLNPRPLKSVHQLFNKQIAKRQDKTPNFYTRKIPQLCTNSKPKMNDYLDKNSRFIIEYLVVSNISILVIGKKFNCIPKINLGSRNDQNFVQVLPAGFVDFIAYKAGGERVNFIQQEESSTFHSNFCVVMAFQFIISKPKLNINSATSKFPLELYCYACGVVLLIHVNGFCNIMKRAIPNAFAKGIGAVVVQQIRITPGQLVA

SEQ ID NO: 1246 - protein, 429 aa, synthetic construct
  REGION 1..429: note = Synthetic
TTNNRVKTKNKVKLAILKELTRNSKDLYNKALYTIREHFFSTKKYLPYKEVYNLLKSSEEYKKLPSNASQQTLKQVDNAFKSFFELLKAKRQGKIEDKPSIPKYLDKSGHFKVIYTKIHLKTMDNGYIRLALPKYIKERYKVNYLYFKIPSHIQDKEIKEVHILPYKPYYKISFVYSDGDKNYNHYTTDDIMAIDLGIDNLATIVTRYDKPLILDGKSLKSKNRYFNKKISVLQSSITKGKNSKEWEKESFKRLDVWYARRENYIIDYLHKTATKIINIAIEKGIKTIAIGYNKKWKEKCNLGRKNNEKFLSIPHSHLLQYIKYKAAQHKIEVIEVEESYTSKCDALALEKIQKHKTYLGKRIKRGLFQSSIGKLINADVNGALNILRKSVACDSLIQEIAGRGLVFRPVRVYIHPYKPSHKRSPDYNL

SEQ ID NO: 1247 - protein, 521 aa, synthetic construct
  REGION 1..521: note = Synthetic
NRYPAIRTLIIPTTYADEEDINILIGMTKRYNILVKMAHKEIWQRNANRQKLYFQACIPVQVKEYKAGYCTMRNQVSRKLFEELKKQYPDDTTLKGLNYYRSKLVKKGSEYLIPSKTAEAGAEAAYQNFKSYWAVKKSRSNFKYLAGDTKTTREHLKEFPIVFKKPGIKLLHKNFNGDYLIPDVDHPANTIRLSLGVALNKVLKQRYIFIPVKSTILKYPIKVIAITGLSERYTKLPSKKGRPNNKNSHKQMNNYNKMCQEKLSEIKTYTTPDIHISYEILVPEIDPELANIKNLPKKSLEVLFNENRYKVMGIDPGGVNLMALADNTGNRGIVFKLGTLKGLLNGPTTGRTPSRSSCYNLNQALLGIASEVVYIAVKRGIDIVVFGHNKGIKNKKIDSTGKVLYNPNALFRFIPHISLMNKVRNSCEKAGIVFIETEESYTSHTDHLILESMTTTKEDWQTRKKRRVNRGLFKTESNLIPSGYINSDWNGALGIARKIFGDSFIITLPKKHLGGIEVITK

SEQ ID NO: 1248 - protein, 554 aa, synthetic construct
  REGION 1..554: note = Synthetic
PQRDNGIGVNDGPAGTADRKVAFRPFGGETIAQVDRQIAALSKGSTAAPPGHFPLEMAHQVNNGYYDSMEFKTQPAEVMMPPPEVRRRRVRASAGMLLAQEAAAQLKNDVYSELRWAHAQHERLPSVYAMCHQLKAASAGIALGRAKQVQHAIADAFAMFRSFRSNVFAWAKDPATRPGKPRPPRFYRRGQRARVCFDYQDLKVREHRLYLPASFGVDVLTLVKRDGEPLLGPGDRLVEVRVEPCRSRQWVHLDLIIRRAASAEQRLRAGSLLVDLGVARLATCLDDKNLTAFFVDGGVAKAILQRGAKWHARLRSEAALGVRHGKARARALARRSARQMEDLIKKVALQLVTYAKVQGLARVVAGRNKAWKQEVNLGKKQNQLFTFIPHQKLIEALRTKCVRAGIEFVETEESHTSKTDHLACEAMGPKPRGYRWLGSRRPRGCFRSSTRFIIQADVNGCIGLGRKAGGEQWLNDFIGRLGSSPGTRLVPRKVHVNGRHVPVPSPGVRMPHCRGLSSKAWISTKVALVKAGLIPDLQGVASATYKSQGFPKAA

SEQ ID NO: 1249 - protein, 450 aa, synthetic construct
  REGION 1..450: note = Synthetic
DIKVKTAYKQRLKNPPEILVKYSCYAKDLWNQSNYILLNEYQKTGRVPYVFDKGGKTTFERLMHATKNLDGEINWTKLPSCCAQNAGILLFNSWRGWVASLQSYKRDKSKFSGVPRPPQFLPKNGKQVIEFTNLGKFDGDVVMLGRASKGEGLLIKLKCDDKRKEQIKKTCKSIKIVPKANNEYEICFVYDDIPVVASEKIAGRLMTIDIGVNNLATCFVNDVSTRPLIINGGIPKSINCHYNKKTSLLKSQLTKGRDVLENKKKGKLTSKQINTITNKRNRQIHDYFHKASKMIVDYATLNKVEKIYVNGNIGDMKQGIDLGKRANQKIVQIPWKKLIDMIEYKARRYEVEVIRDVDESYTSKTDHVVLESMVHQEKYAGSRIKRGLFKSSAGIILNADVNGAVGIARKVSGDEIVLESVNWKTVMNPLKVNAGDRIFGSGGDVEQSTT

SEQ ID NO: 1250 - protein, 426 aa, synthetic construct
  REGION 1..426: note = Synthetic
SYSEKFQGENLEKKIFYEICSIAKCIYNSSLYNQRQYYRESEGKYLEKTLLYQKIRDEVSRLYKKLNSWVSQRIIFQVDLDYQNFFKAFKVKKEYQIVRPPKYKKKGKGLVPVVFAGPALKQEEKTLRLSLSKYLRNKFGSKFLTIEIPSFLEEKEISEVTIIPIGYSQFEIKYTYEVEEKKSEGKEVLALDLGLNNIAAGVTTKGEAFLFSGKWLKSQNRFYNKKAAEFQSQIDTEKNPLKKMKLIFHKKMLTKKRNRKVKDEIHKISFNLIKFCTENDIGKIVIGHNKEWKNEINIGKRNNQNFVQIPHSKLITYITYKAKLQGIAVEEIEESYTSKTDSLALESIQKQEKYLGKRIKRGLFKSSIGKSINADINAAINILRKCIGDSLSNLEEIISRGCVFHPWKFEMKRSIHSHLKPTSLPL

SEQ ID NO: 1251 - protein, 419 aa, synthetic construct
  REGION 1..419: note = Synthetic
YVEKVDLPKDKLIVLKAMCNESRRLYNSSLFQVRRHYKENDKAYLSYPKVDKLMRETQPHIYRRLPSQVAQNTERKLHQAYNSFFELLKLKNQGKYDAKVRQPKYKKDRRLFSIYFGTRTFFREGGKIRLTISKFHRNIFGIRFLYIPFPRHLESHDLKEVEIVPKGYGRFEAHFKYDSPVYGPIQKITRKGSLSIDLGISNLASCVSTKGDAFLVKGLKLKSINRFWNKRTANLESSKAKERHKILKMMLENDIAQITFKRNRQVKDFLHKASYQIVEYAVREKLESIVVGKNIGWKDSINIGKKNNQTFVQIPHAKLIDYISYKAKKHGIKVVEQEESYTSKCDSLVLEGIQKHSQYLGKRTRRGLYRSSTGVVLNADMNGAINILRKAKKSKRESELLAEITCMGRVFRPWHLAVS

SEQ ID NO: 1252 - protein, 482 aa, synthetic construct
  REGION 1..482: note = Synthetic
AQKVKIRGLTKPQFKRLKDLTGSAKNLYNQSLWTLREAFEATGKYFSYPQMDKAMKQVENLEGEINYKLLKANIAQQTLRKLDKNFKGFFRAIQDFKKNPSKYKGRPKPPKFKQKQHDNLVYDYQAFQIKNRITITEKPFCTSLKMPDGKVFHQAQFILFEQVAVLEKGLEIKVPNLLFHEEIKQVEIIPKPRYFHAVFVYEEDLNHFKQVPQNDKVMSIDLGLNNLATCVTNGVVKPFIIDGKQLKSVNAYYNKRKAKMQAKLEKQRGKKWSKKLQSLTNWRNAVINDYMHRASHVVAKTCVDNGISKVVVGDVAKSLNRINLGKKTNQNFVNLSLGQFIDKLGYKLGSHGIELFFPNESYTSKASFVDSDKMPKQYNPNAKLSYTFSGKRIKRGLYKSSDGTLLNADANGAYNILRKTDSDFSFSTLAKKVGSKVKEWLHPTKRFRFLKSITHQKSNFKRRKKVEENSPSSVLGQQLSLF

SEQ ID NO: 1253 - protein, 289 aa, synthetic construct
  REGION 1..289: note = Synthetic
MVFLEKGLSFSLPEKLVGKTIKQVEIVPKYRHFEAIFVYEDDEIVDTVSPSDKVMAIDLGLNNLASCVTNGVTRPFIVDGRRLKSINHHYNKRYAKFQSHLKKTRDRKWSNRLQRLTDRRNARITDYLHKATRKVTDICVEQGISKVVVGDVTKSLNQINLGKKTNQNFVNLSLGQFIDKLRYKLELHGITLEVINESYTSKASFVDDDILPKKYEPKTTHTFNGKRVKRGLYRSQNGVAINADVNGAYNILRKNDSKFSFNKLVKKLGNYFKAWLHPTERILIDLPSK

SEQ ID NO: 1254 - protein, 438 aa, synthetic construct
  REGION 1..438: note = Synthetic
KSYKTKIRGLSKKQLDRLKELSNSAKNLYNQALYILKNEYKTTQKHLSYYEMDKIMKQTLNLESEINYKKLKAGVSQQILKKLDINFSSFFKAIKSYSKDKSKFKGCPKPPKFIKDNYYNLIYDNIRFQVKNDFIVLEKALKDENGEILVDKLEIKIPKYLIGKKINQIEIIPKYGYFEAIFVYEDTKNYKQIAKNKNVVGIDLGLNNLATVVSNGIFKPFIINGKPLKSINQFYNKIMAKLKSRLDKGEQKWSKRLQKLTDNRNNKMKDYLHKSSQKIVEECINNDISTVVIGNVANSNNKINLGKRNNQNFVNISLGQFVEKLKYKLEAHNIDVKVVEESYTSKASFIDNDKLPKKLDIAKKFKFSGVRVKRGLYKPLNAIFKKVNADCNGAYNIIRKVVPNFSFEELSKKVNDGIAGWFLPHIKIIDMSIKVNVN

SEQ ID NO: 1255 - protein, 469 aa, synthetic construct
  REGION 1..469: note = Synthetic
KILLNQLNDDQPELFKILKNSKNLRALIAGQKGGKQADKITQCREYLKDHKLYQELRELYKQKLNEKLVYMLVHDIVKDVQNTIDKRKKGQKAAFPKAKKLSKINNFSLNFDNCKVKFNKKDNKIKLCFGREWLIFDLPYQSLSTNFLTNFKTIYKSFKLVYRLGHIEFVFHKKSDNVVPSHQFKKKAGRRKEKTAALDLGFKRLFTLFVNDDTTPSIAYENSEIINENCHYAYRTAKLQQIMNLHFNHHKDKDHHEYRHLKKRHNNAFYYRNNYFSDLFHKMSVEILNYCAKHGVTRLVVSKNLSFAKTDGSIKLVKRQKQPFYQIPFGKLIKMLEAKAKHFRIKIENVDEAYTSKTFFNKNIQNVIQEVKSLKDNQQKVPSTVFGGIRDGDTFYVNGRGKNNTLKIHADINGAINHIQVSKKPIKTDYLLEEKNRFKITQPLVVKSLKELRQLAITDLLWTDGAKAA

SEQ ID NO: 1256 - protein, 545 aa, synthetic construct
  REGION 1..545: note = Synthetic
KKQLKTFSLHEKNMKYVAMMKKAVLRYKHVENMLNIILNKESDIIFALPVEQRDYTLFNLLTNSIIMKAVISGNNGGEKTQKGIAQCKAHLELHHKDLYQQLLSEGQQLNDKNISQIITRLAKDWKNSFKNLKAYYADKSGKKFTGKPDTPKAKKLSKVFNYSVPLEVSKFSLNKKNKLGINIWKKMEYVFFRDNAYLKDKKINNVTVALSHGHIYYQLSYQNKKIEDITEKKDSNLLPVRKPEKTAGLDIGVHHLFSLFVNDDRTESLVYRNAKMVHYNCSFNKQMARLNTLLTRHVAEYKTVSKQDGTVVTVPERYTAYGQHIKKTISNMFNSRNLFMEGEMNKLSSALLQYLKKHEVTRLVLSKNLSFAKTAGTIELRKKTKQNFYQIPFGKFLNLIEEKAFHYGISITNINEAYTSKTSSLTADVNQVKQMAASKEPVTSNELNGVRGVKSKKLTRGLFRDNILNTIIHADINAAVNHIKVAFPDGISAEGLLKYRRKLNNSVKLKSANEFSFLLKENSDSRKKEVDIKLIQPALYVRDQV

SEQ ID NO: 1257 - protein, 554 aa, synthetic construct
  REGION 1..554: note = Synthetic
EKDYKTFSVHESNLSIVKSITKTLLTYKHLENILNILLQQQLSLSDNDNLTLQQKELHKDIFWLLLNPMVMKAVLSNTSGKKYKDFIIKINTYFKDNHLFQQAKSLHNELNAHNSSMLIRRLNKDWKNYFSSLKDFYNGNPKGLTGKPSYPKAKKLSKVFNYSLPLEPSKFSLKKLKQGLLGLNLGKKIFYVYIGKNIDYIQDKTINNVTISYSHGHIYYQFTYVHNKPLILDKELSFNKKKVIKEAGADVGINNLLSLFINDNSTQSLIISGKELISYNVHFNKRLAKTNELISNEVSSYKTIIGKNNQPYEVPESYTELGKKLIHRREQLFERRKLYLDDYLNKMSKKVLTYLQLNKVNVLVLSKNLSFTKTTGEIKMIKKTKQKFYQIPFGRLLNLIEEKSSQYGIEVKWIDEAYTSKTSSISADVNNIQRKGKELREKESKNLPIEEKDLITSNDLKGNRGVKKGLGRGMYKDTIIEKIMNADLNGACNHIKVYLGNRSKDMIMRLKQQSHYLWKWCNPVKIKSNHEFDKILKNIKNLSQIVNRQNLLCE

SEQ ID NO: 1258 - protein, 518 aa, synthetic construct
  REGION 1..518: note = Synthetic
KYYLKTFSLHEKRRDFAIQIQNYIKDYKHFENMLIILSRECWGAEHYDIVNLLHNKVTMKAVSQKAKGKEKTKDNIKKVCDYFKNNDLFHEMVDFSKKNLNGHNVSMIVARLKKDWDNSKNKRDEYFKDPSKFKGKPQFPKPKKLQNVFQYSIPLEGSKWSTKKLNKNRLGFTLSKRQILTFVNANHAYLKNKKIKSMTISLSHGHVYYNFNYVEKINKKVKHNPLKSVKKEAGLDIGVVNLASLFINDFNSSSLILSGRNFKHYNSTFNRKLAKLNELISKEVIEFKEIKNKKGELIKVPLKYSEKGIKLRFIKSNLFEKRKRYFDDQFNKLSKKILQFLKSNHVTHLVISKNLSFTKQTGEIQQRKKTKQNFYQIPFGKLLNLIEEKSVTFNIEVKDIDEAYTSKTSCLSSNVVDIQALSKTQKITPTDLNGNRGVNQKRGLFRDSLLNKLLNSDLNGAANHIKLGFPDVDLSVYRNHLHKVCNPIKITSTSELDKLLNDLKNSEVEKKTTLQKAA

SEQ ID NO: 1259 - protein, 520 aa, synthetic construct
  REGION 1..520: note = Synthetic
KLELKTFSVRERNPKIIRHAKKAIFTMKHLDNMLNIIIAEEYLYVKSKLSEDIIFEESDNVWQVFSLLLDPQIMKGVLSNNTGGQSTKDRIKIINDYYKNNQLMQSAKSLYEYLNDKNISELLKRIKTNWENYFKNKSLWFTQKEASGLTGCPQYPKPKKLKNVNQYSMQLSCDKFSLKRKNVLGLTFFKKQIQTRFLSNQYVNSKTIKSLNVSYSNGDIYYHFTYEVDKKLIKQNNKRAQRKIKQAGLDIGVLNLASIFINDEDTQSIIISGNEFISKNCFYNKLLSNYQEKISKEAIEFREVIKKDGTKIEIPTLYTNKGRKLKKEKSKLIEKRKRYFDDKMNQYSKKILEYLQKNKVTDLVISKNLSFTKTTGEIKMNKKTKQKFYQIPFGKLLNMIEEKSPMHNIFVHKEDEGYTSKTSCLSSDVNKNQEKKSKNEPILPNDLNGNRGSKGKKLSRGLFRDTVLNVIINSDLNGAANHVKLAFKKVRITDLKNYLWKLQQPKKIKSVFEFNCFLSN

SEQ ID NO: 1260 - protein, 563 aa, synthetic construct
  REGION 1..563: note = Synthetic
FIIDGSFSLRVSNRKAKKALTYSLTKDCSQIKNVIIMLRNSLYTQSKTSKFNKEIYDLFLSNEILRESVYGRIGSEKTKDDIKKLTLYFKNNELFNHLCEFSQQKIDAHNFVSIVNAIKSNFKTFNTNLNKYKENKAAYAKEMGNSGMPKPPKQKKLSRINNASLEIDKQMWSFRKETKIRYVEEEKILKSGKIKKIRKKIKERYDYLRVRIGKYTNKIPLNLNELPKPKGKEWRSLNVSHRNNEIYLNFTYGHLDLPIVNDLSIKKIKKVKKIPKYAAADVGLINTLSVFVYDKETPSFMLSGKRFIDYNCKYNKMVAKLSASINEEATEWKSVKIKTYDTEGNVIKDEKGEEVKEEISIPTGYNERGCFLLKFKSFLTEKRNRFFKEEFEKMSTHLVDYLEKNKITDFVTSKNLSFAKIKGDIKMHKKTKQKFYQIPFGKLLNMIERKCKLKDINFHNIDEAHTSKTSCLSKNINKIVKLRKTRKKSLSTNDYGGSRVKRGLYKDYENNILFNADINGAINQLKIKFKRLDFSWLVDFKGKICNPLRIKSDEEFIQKLLVD

SEQ ID NO: 1261 - protein, 531 aa, synthetic construct
  REGION 1..531: note = Synthetic
FTILGNFSIQVNDRKSKKSLSFSIKEDCFHVINMVLILREQLFSLRKTNQTFENLYQSFKDIEILRETVYSRKGKAKKAQKIRELTQYFKNNSLFIALQKYAKRKLDAKTFHSILTTINANFSTYKTHIGKYYENKEAYFKEMGTKGIPKIPKPKKLKKIYHASINVDKCRWNFNTITKKVKKEKINHEVLSIRVGTKRLYISSNSKNFPIPKDCQIRNLNVVYSNDNIYLNFGYGKPNKQITAEKLVSKPTKIKKELIASGDLGLINILSVFINDKNDNSFIFSGKRFIKYNCKYNKFIAKLNKDIAKNATKWKEITIKDEETIKIPLEYNARGLYLMDFKRFLTEKRNKFFKEEFEKLSTSLVKYLDKINVTEFIISKNLSFLKNKNHEEKNKLNKKTQQKFYQIPLGSFLNMIERKCEKIGIKTTDIDEAHTSKTSCLSADVNEMVELRKEREKSLSTNDYKGNRVKRGLFKDKKYGIKIHADINGAINHIKVAYKKINFEWLLDYKRKLCNPRVFKSDIDFRQQLLC

SEQ ID NO: 1262 - protein, 540 aa, synthetic construct
  REGION 1..540: note = Synthetic
FKIEGCFSVRVKQTKAKKALMHCIKYDANHAKNMVLILRSQLYESQKTSASMRDIYHAFINDRLLRDTVYGRKGGKGADKVKLIREFFKDNALFQQLCTFSQRQLDAKTFHSVLGSVSASYEQFFTNIKSYTANPTAYAMKFGNTGAPRPPRAKKLVTVSQASIALDREKWSLQDRIVDKQTKETRPYVRIKCAHRKAIFVPINWHEFPIPSGKCLRSLNVNISNDAVYLNFTYGQEATQSGGKKETAKSIQNRPKWAAADVGMINVLSLLVDDKDTPSLLICGKAFTNYNKQFNRHKARLDKDIAAQATKFKTIKRKNDEIVIAIKHSPLGESIKRTRTHLIECRNRYFDTEFNKISRRITDYLLQAGVTDLALSKNLSFLKTSEEKSKLNSQTRQSFYHLPFGRLLNLIEQKCQLVGIQIHFINEAYSSKVSCFSADVRQANALRLEKGQSLSTNDCKGSRVKRGLYKDSGSGLRFHADINGAINHIKIANADYEPFHLLHHKKKLCNPIRIKSDFSFCRLTPATRESKQYHCSEIAA

SEQ ID NO: 1263 - protein, 519 aa, synthetic construct
  REGION 1..519: note = Synthetic
KSAEIEGTFEIRINNNDDKTYLFDYIYKYKHWQNIITILVTDLFKKNNSDYRYFLDYEIVRACISDTAGSIKKQEKIHYIKSKYKDNKLYKNLLEVGKNLKNHNLVMVLRRFKKDFNNYFKAIKDYKINSHKYTGMPQMPKARKISELTNYSIPLDNANGWSTKKNLIGINLDSKMRYFYIGKIIKNGKVLDKKIQSVSIKMRNREIYLSFSYINEEQNNELIESKAHNLGSINSNSAGIDIGLNNLISLFIDDKESQSIIVDGARYKYYNSKFNRFIAKLNNSISEEVIEYKTIIKKDKTEIQIPIKWTKRGHRLKRYVSFLYRKRNDFFETEFHKISKRVVEYLEINGVKRLVLSKNLAQLMNNGECNLRKKSKQNFIQIPFIQLIHYIEQKAIKNGIEVIFIDEGYTSKTSCVNGDVLAVQTKSKNNQKPTANEFKGTRAKRGLFKDIVLNKIWNADLNGAVNHIKVAFDSCFKWLKDALFKLCNPKVIKSANDFLVFNDGIVMQVKSGYQVPLKR

SEQ ID NO: 1264 - protein, 296 aa, synthetic construct
  REGION 1..296: note = Synthetic
LYAQYSNKLYPTTAVLDNKNSYLQASHSKIKNKNHLQFKEAGIDVGTNNLAAIFINDEITPSLIVDGRKYKDYNFKFNQLITELNKNKTIKCAKKRKKIEKIISSLYEKRDKYLKDQFFKIAKRITEYLYLNGVSTVYVSGNPAGLRNMWENNSNKTIPQYSDQIYFFKFLRYIKCHAQDYGIRVYYIDERYTSKTSCISDDIKNIQNNSNLTNTFNGKRVTRGLFMDTVINKAFHADINAAVNHIKVATGEDFSWLKNRLFKLASPIRIKSNQEFCKLIKKLQNSTQIDKKAIFC

SEQ ID NO: 1265 - protein, 546 aa, synthetic construct
  REGION 1..546: note = Synthetic
NTELRTFSIRIKSDKLEKKLKNILFAYKHFENILLILINQNYNLYKEDKDTNDFNLLTSPQLMRNALYEYNSKHLTQVEYLKNKYKDNQLWQALKETAKKLKSHNLLHIINRVKANFKTYFTNLELCKQNPSLFQGMPKPPKPKKLSKLTNYSVELDKYCSLSFAHLEKKNLVGINLSNSIVYIHINKEQVKKLTDINKLYSARVIYDNGDLYLQISYLKELKKTQTKQLKYASIDIGINNLMAVFIDDENTPSLIVDGKPFKHYNAKFNRLVAKLNESKSKEVLEWGVSKTGTKYPVKYTEKGKRIGKFISFLYSKRNRFFTDQFHKMAKRVVEYLHLNGVSELFELFISKNLAQLKSNGECELSKAVKQNLIQIPFIKLIRYIEQKAQEYGLHYIDERYTSKTSCISDDIKSIQVCSKHFLELRGASACLSASKRVDNALDSPHLTNAFKGKRVKRGLFLDTVINKVFNADINAAVNHIKIGTGKCFVWLKDKLFKLCNPIKIKSDYEFCELLKSLQNSVSGKSVFYNTEAPQSNRLVENVSFC

SEQ ID NO: 1266 - protein, 479 aa, synthetic construct
  REGION 1..479: note = Synthetic
DTKLINFYIRINFELENRLKPLIYNYYSFESILVNIISRNHNLFKEDMDVNDYQLLTSPRLIINTLYYYNYQYSEQQEYLKNKYKNNPLWKELKEVAKKLNPYNLTYIIERVRTVFDTYFTSLELYEQNPNLFQEKPKPPITRKLSELTEYSIELDKYGSLSFVRLEKENLIGINLSDQMVYIPVSNDQVKKLTEMDRLYSVKVVYDDEDLYLQIGYLKESNETENKQTKQEIENYKIKHTTKNEQAKYAGIDIGKRNLMAVFVDDETTPSLLVDGRPFKRFKDKEKFESLTTLLHNMTRLTIEYLYLYGVTDLFVAKNLLEEQSSNTTLFEELIKYIEQESEKYGLQIHYIDESFTSQVSCISGDINSIQAYSKQFPEERGIFDYLFALKRITNPNYTDDYSGKRINRDLFLDTVINERFNADLNAAVNHIKVGTDKSFDWLKDKLFKLKEPIIIKSEEEFEKLLESLRNNKSSKSAN

SEQ ID NO: 1267 - protein, 463 aa, synthetic construct
  REGION 1..463: note = Synthetic
LRAIKVRIKDKHIISYLKDKILITQHLENMMIILINQDLNQNNGNNFKFLTNGRVMRAVFTNSSGGKLKKDVDYIKNYYKNNSLMNDIIDVTKELKIHNIVEQIKNIRKNYISTYTKSQMGDFKANKPSTKSLALANHITLYMDGYKSMTFKRKNIIGLNLNDKMIYTHVKHEPLLRIVKDLNNIKNINLNYSNGYIYMIINYTHPKIHIIPAEKVKYAGLDIGIKNLASIYVHDNTTKSLIISGKKFISYNSSFNKLISKLDKDINELEKTSNFEKVNYLNYYKKFLYEKKYNFFFSEFHKLSKYILIYLKDNDVTHLVLSKTINELKNNGKCKISKNIKNHFLQIPIIKLINDICLKAPSFNINVIEIDESYTSKTSCLSGDIFEVKSKAFNNSISTDVFGGRRVKRGLFKDYKYNKIINADLNAAFNICKYGSFEINNFENIKIHYYKLCNPIKIYTMAI

SEQ ID NO: 1268 - protein, 463 aa, synthetic construct
  REGION 1..463: note = Synthetic
MKIRVKDRQFVSYAKKKLYSTKHFENMLLILIHQDDKQNDKKMFYHLTNSSVMRAIITGNKGGKDAEKVELVRNHYRNNELMKQLIETGKTLKIHNLVETIKEVKKNYKSYFTKLKNGDTTAKPPKPKKLNKLNHFTLHTDSYKSHTFKKKNKIGINLSDKMRYTHVKHSALKKVVGRLENIKNINIHLSNGHVYLLIAYENAAPKVEENLAYKAAALDMGVNILVALFVEDEKTPSLLIDGTPFKTYNANFNRLMAKVNETISTSKSVNRVSFLQKYRSFLYEKRNNYFFSEFHQMSTRMLEFCQKQGVTHLIISRNLAELKNNGEIKLRKKAKQPFVQIPFIQLLKSLMDKAPKYNIHISEVDEAYTSKTSSISADIHEIQSLAQENTPLTTNDYKGSRVERGLFKDQVLKKIVHADVNASRNICFLGSWNEKDISIPFPKLCNPIVIKSDRKFVQLIANS

SEQ ID NO: 1269 - protein, 501 aa, synthetic construct
  REGION 1..501: note = Synthetic
LRTSKIRITDQEFKEFAIEKVYLTRHFENMLLILLEQDYKQEIGDRKLISNPYVMRAVIRDTKGGQYADKVSYIKDKYQDHGLMQDLIKVGKQLKKDNLVMTMRKVRKDFKSFYTKVKNGDNSANPPKPKKLSKMNSYTLLIDNDKGMSLAYLKKGQNKLGITLDHDEGRKYLYIDHQAVRDIVGDLDNIQSVNLQYSNGELYLLITYHQEVETNNDRPHKLAGLDIGVDNLAAIYIEDEASPSLIVAGKKYKTYNSKFNRQIAQISNSIDTCKLESRKNYLRKYKSYLFEKRNRFFYDQFHKVSKRLLEYLDQHDVTELVISDNLNHLKNNGNCKLQKKTKQNFIQIPFGKLLDYLKYKAKEYGIKVTVVNEAYTSKSNSFTNEVHKVKSLQQKIDSLKAQQKQIESDIKYQQYQCLIDAYQDLLDKYNYQGKRVKRGLYLDYINDLAMHSDINGARNIAKLSSNYQKKDCNNLKKLCNPIKVENDYQFCQLLKQDKQAA

SEQ ID NO: 1270 - protein, 534 aa, synthetic construct
  REGION 1..534: note = Synthetic
EELRTFTIQLNEKICTEGFYKESMDHLFTCRQFENLLLILLKENYERFKEGKDTNDFRYLTNAFLMQNVLFDYDGKAKNEKKYITEKYSQYPIFQELLKSAKAVGHNNAPSLISRVKNTYTSYFELLKAYEKKELTEKPNPPQPKKLSKIVNYAIDLNNAHSVSLCRLENMSVFGINLNSEMKYIIINPEIIDGLNLTKKKIKSAKLVYSNGYLYLQTGYYKEINETTSLTKKDAGLDIGIKNSISCFVDDNKTPSLLINGGDLQSYNNKFNNELSALQTELTTKEVKEWGASKTGTKYPKTYTENGIKIKEEISVMFEERNKYFKDQFHKISKGMLEYLHINKVTDLYISNTLAELKNNGKCKLKTRVKRDFIQIPFLSLFEIFKYKAKEYNISIHFVDEAYTSKTSCITANINKVQELNKNLTNNHTPSEPVPLIRVEGKEGNIYKGKRTQRGLFKDTILNKVWNADLNGAVNILKVGTKITKTSFEWLKNALWKLSNPIKCSVCELHNIYAIASTGLRYRTQRNQSLIMSV

SEQ ID NO: 1271 - protein, 544 aa, synthetic construct
  REGION 1..544: note = Synthetic
SNRVLTIRVSGKERKEKVRKLLLDLAHFKNLWILLIRRYKELYGYYLTDQSILYGLIADREYSSKKEEKIQKFREIKENILQDEKLKEFLKALKEQKRRTDNNYLLQQVIRSVVKSFNDYRKAYREYQKNPAKFKGVPRPPKPKKLKFLMNFSVELNVNTFEQLDDSILIKLRINNKEFLKVKLPKGFNHPVKSIRLKIFGTDVYTDVVYKVEQIATSTTFTTSTTSKTSTTSIAGIDLGLNNLIALVSTNPELKSLIVSGKEIKAFNQWFNKKKAKLQSEIDTLKNKLSQVENEEKAQSLKQFITEKLIKLKELSAYRKRKIDNDFHKISRKVVDLLIATGHKKLYIGKGATESKDGIDIGKKNNQHFVSVPFRRLIELIKYKAEESGIEVEEIEEAFTSKTSPLADILEVRKVGQKYLEAKSKEDSSLIKQLLEELKELQQAVRRYRGLLKDKVLNKLFNADLVGAYNIARVGESSLRLIGNLKLLFIKLCNPVRLKLIEFLYEVSPESLRRGIGSSSSPGAGLSPSDYQLCGNLNTFCYNW

SEQ ID NO: 1272 - protein, 538 aa, synthetic construct
  REGION 1..538: note = Synthetic
LNKTAKRILSIRISGKQRKEKISNLLYSLAQFRNLLIIFNKIYQQNYGRWILNESYLYALVNNKGYKPRESKENFIEKLKEFKTITDNIEKVNQLKDFQDKLIKQKQKIKNNYTVQTLIRQLIKDYKSFFKSIQKYKENSNSFNAIPRPPKAKKLKDIPSFTAELNVNTFKVLEEEKGKHLLITLTNNKEEKQYLKVKLPKDFNYEIKSARIKFIASDIYVDIVYTIPETQINSNQEKTHIAGIDLGLDNLITLFSTNKELQTIIVSGKEIKSINQWYNKEKAKLQSKIDNIQNQINKLQKDNLDTTALEKEKKLLIKKQKELSAYRNRWITDTFHKITRKITDFLNETGHKEVYIGKGATESKNGINLSTKTNQNFVNIPFRKLINQLKYKLEEYGVKLTEVAEEFTSKTSPFADLHKVLETGKEYLKAKTEGNEGILKQLKEKLNQLYNGIRIKRGLYKDNITNKVFNANAVGSYNILRKEAKPLIDEETLIDKLSRPIRLTLNLISKVTCESLLEIAGRRPLRVHCKRTLVNNFL

SEQ ID NO: 1273 - protein, 505 aa, synthetic construct
  REGION 1..505: note = Synthetic
VKRAIRIRVSSKRKRGARELAYDLAQFRNLLLIFQSRYYALFGQVILNQSVIYSLLADQTTKKKPEQEEALREASERIIQHPDLQELIQRMKEQKARVDNNYVLQTTIRQVIKDYKSFLASLAEYRVNPGKYKERPQPPKPKKLGKLTQVTAEFNSNVFEVEGNTLFLRLRMNGKKRIKIKLPRDVESVSSVRLVYHLSDVWVDVIYEKELKEPEAGLIHLAGIDMGMDNLISLISTNPDVKSLIISGREIKSFNCWFNKKKAAVQSAMDTLSNKIAQEEDEPRKNAMSKELLKLKFYLHNLYNYRDRWIESHFHKVARVLADFLYETGHKAVYLGKGATESKDGIDLGKVTNQNFVSIPFRKLINILKYKLEELGMKAEEKEESYTSKASSLSDDILEIQRKYADVKEKQGEIKVKCSGKRIERGLYRDNVLNKVFNADLNGALNILKVGAKLRRLTLSLKVLLCKLCNPLRLNLYDFIYRFKSKAESPPGIGDSRLAAAGLTR

SEQ ID NO: 1274 - protein, 507 aa, synthetic construct
  REGION 1..507: note = Synthetic
MKRILSIRMSSKYRGKVKSFIYDVAQFQNLLRIFILEWNKKTNDIFRLFNQSLLYSLLADRIRSNKSEWQKKELEEVKGIIEEDEKLKVWIEKLREQKKKVKNSVACQSVIIQEVNNLKSWIRAVREFKRNPEKFNSKPGLPKPRKLKNLIRFSVIVPFKVESRKLWLKLRNGEKSLEVLLPKEFNYKVKEVRVVYDMEWVEVHIVYDKDIDIQNDGVYQAGIDIGLNNLLSIVSDDPELRSFIVSGKELKSYNRWWNKKKAEVQSHIDRILNMIKEEKDEEKRKSLEKHYWWFKKYLWNLSKARDRKLSNWMHQITRRLADLLYQTGHRIVYIGKNAIDKHEIPFSKVVNQNYVYIPHRKLVNMLKYKCEELGIQVMEVDERYTSKASPISDDVVEIQSKRENGEKVKFSGKRVSRGLYRDLKLGKVFNADLVGAMNILKVGAKLRGLLLNLKTLFVKLCNPVRFKMFDLIYKSNPESLLRVGIGDSKPAMMREALAYEGAGGRMG

SEQ ID NO: 1275 - protein, 520 aa, synthetic construct
  REGION 1..520: note = Synthetic
LAERIWISDRRKVERLKKLVYDLAHFRNLTLIFIREYHRKTGKWITSASVLYSLFADRMNRKSGEEKRRKVEEIKKNLDEGLKEWYLKILEQKRKIDNNWLVQQVLRQIESDFKSYFSSIKEYRKNPKKFCGEPKPPKPKKLQNLPRFTVEFNANVMRQNGRKLYLRLRVKGNRCFCIKLSRSFKVTSARLCYFLGSVYVDVIREEEFPDVKPLGNHIAAVDLNLDNFVVLVSTKPAVPSIIISGGAIKAFNQWFNKVKSKLQSEADRIRNEIEKFDEPPEELVKKERELRAKIRILCVHRKKWFDTHFHRLTKYLALFLYRTGHKTLIIGNGALNAKKGCNLGHKIAEKFVQIPYRSFIEKLRYKCQLLGIEVKEVSEENTSKINCLCDSPDARKMLSGQRIRRGLYLAFLKGKKVVLNADCNAAFNILRRGASLPNLTSILDPKVLMWKLCNPVKFKFFRFIELLQRNPRIPRGIGGSTAPEGQGIAPASLKSSENFIRHFLKQKGCAGLPATPLTPL

SEQ ID NO: 1276 - protein, 325 aa, synthetic construct
  REGION 1..325: note = Synthetic
SVHGCRVVLKLLDDELTVEMSRERDVSSVRLVYYLGQFYIDVVYEKEQRAPLLVGNHAAACDLNLDNLMVIVSTNPIVPSIIVDGRGIKSFNQWFNKNKSELQSKHDIILNEIKELRDKGKEIPDELLAKERELRGRLRALWAYRKRRLDDWFHKITRWLTEFLYRTGHDVFVIGTGVLEAKRNCSERLNKKVTEKFVPMPYRRLIQLLEYKCEERGIRVIEVPNEEYTSKTCCINDDIRRIQRSERPKFSGRRIARGIYRTIYNKTIEINADVNAAFNILRIYANIQPAELFEPNVLKWKLCRPIRVCFTDDVNELIERILNHR

SEQ ID NO: 1277 - protein, 491 aa, synthetic construct
  REGION 1..491: note = Synthetic
VIGRIYIYDNRLKNIAPFTIQLAHFRNMLIILILKLKEHLSYYPTNEALLYSLLADRLNKRTLNNLEKLQKLNEISNIIKSDNFLSKLLNSMKKLKKELNNNYAIQSIIRQVCRDFKAYRKAYEEYLANSNKFSGKPKPPKAKKLKNIDKFTVELNKMSFKINNKILHVKLHKNKQIRIKLPEFIKEPSSVRITYYLGFAYVDIVYDKHIEELKPLGKYKAGIDLGVENFATVVSTNDNVPSIVVKSSYLKSFNQWWNKLSAKLRSQIDTIKNLLKENPDDKNILLELKILTKRIKKLHLHRKKWMENIVHQVSKAISVFLHQTEHDKVFIGRNILEAKNGSNLSKRVNQNFVQIPFRLFIDKLAYKLKWLGIKLVEVDESYTSKASCISDDIIEIQRRVGNNEKVSMSGDRICRGLYFDKIVNLIFHADVNGAFNILKVGLKKKRLFKKVDKIVKVKLCRPKAVRLFEFCRAVLGNLCPPNWAVEVGLSR

SEQ ID NO: 1278 - protein, 470 aa, synthetic construct
  REGION 1..470: note = Synthetic
RVKVFRINDKYLDYAKYLIKERQKVWNGLCILYNNEDDDMKKVITSYMMMRSIYAPNSKSITDDKKLKLVNHYHNRMMLYLGIEYVFRNFYNTFSNKLFVDIIKEFNANVKVAIKLENKKPKNLRKKIIMKQIKLRRLFKGSITFDSNILKYEDYYVRTTVFNINYQLNKFGSKNNYLKLSINTKDIAKPKNLKLVWKLGRVYAHVTYEKDTNIHKYDKGYNMSIDPGQDNYYTIFSDNPNAPSLLLRNDAINRYNRIDTNIMTYYKNLRREYNKHSYYGRYAKINNTIINHFDVNRSLIIRNEFHKMTNRIVDYVRKYKITKVIIGRNKHQKNKSSMNRKNNRKFHNIPHYKLNEYLEYKLNDIGIDVVYQEESYTSKVSSLNSDVNVWEFKLGNKYTANDYLGVRLCRSVYLTKTNNGQIVELNADINGAINILQKHIKSHINIDDNWNSIFHPITIRNDKQFLDILV

SEQ ID NO: 1279 - protein, 479 aa, synthetic construct
  REGION 1..479: note = Synthetic
TLEISITKRSVLNKLKKASLTFQQFKNLIYLCLWEYYRNTKDIKPFLNAYFLEKFVKGKESLAFENEKIKDYREKLKELWKNKIGSDSAKALVQQVSKEVKSVLEKWKRGEKSSLPKPKKLEKVHKFTIFTNQNMLVDKRNLKRGKENSIVIRLGTDFGAVKVKIPQEINVRNVKITWYKDIEAVFKITYEIQKPKTELNKNKWLSIDVGVKNLVSCISNDENLRSFIVDGNPLKSFNQWTNKLSAKLKSKGEQTLERTLWRYREKRIKGFLHQVANLIVRICLERGVGKVIIPNSLNGEYQRESKKGARFNQTFRFFPLEKLLKIIEYKCEMYGIEVVREEESWTSKVSSASGNIEILQNKRIKNISEEEVKNLKLEGKRIKRGLFIDLRLKKAFNADLNGALNLAIKALGSNARETFFALNNWLDKLSRPIKVNLFRYPASLPIIREIAGSISCFSKRSSEGHSTEKISKVITNAYL

SEQ ID NO: 1280 - protein, 426 aa, synthetic construct
  REGION 1..426: note = Synthetic
SFKFKPKLSHNQLEIIKELSWHCSKLYNTVNYQIKNNEDVKPVYTQLEKQFKSNWHNDYLHSHNRQQALKQLAQDWKSFFNSIKDYKKNPSKYKGKPGPPKFKNMDKDPCQIIFTNLATRVRDNKLLLSLSKAIKSKYDVKSLNFELPLAVQSIVDLETSSISNGHSVGNILQQIRIKQDKLSKEWYLLIIYKVEKVKENTNPNIMAIDLGLDNLATLTFKSNTESYIINGKTIKSKNAYFNKEIARLVSIRMKQLGISKIKDTNQIRNLRLKRRNYVKDYLHKASRKIIELAIQHKASTIVIGDIKNIKQGNNLKSFVQIPIQRLVELIEYKAKLEDIKVVKINESYTSGCSAIDLEKLNKSNYDKSRRIKRGLFKTNEDILINSDQNGSLNILRRYLKDKCILRPIKQARDNGFVDNPERIRIA

SEQ ID NO: 1281 - protein, 411 aa, synthetic construct
  REGION 1..411: note = Synthetic
SFKFKPSLTVEQLNIIEELSFHTTKLYNIVNYELRENGFKSYVETENMFKANWHCDFLHSHTRQHTFKVLEQNWKSYFASIKDFKVNAHKYNGLPKPPKFKNMEDRKNEIIFTNLAIRFKNNKLILSLSKAMQKIFEVNTLNFEASGKLQSLINWNALQQVRIKWDNSLKQWYLIVIYNKQELGPVNNTNIMAIDLGLDNLATLTFKDGNETYLFCGKKLKGINAFVNKKIAYYQSIEMKKVGSDKFKNTKMINSLRRYRNNYVNDYLHKTSKNIIDKVIEHKVKKIVIGKIKGIKQDMNYNKSFVQIPIQRLAEQIKYKAELKGIEVKFKEESYTSGCSAFDLEPIDKKYYDKTRRVVRGLFKSNFGLVNSDVNGSLNILRKEGKCIPEIVKTMRDKGRVSSPLRVRVAC

SEQ ID NO: 1282 - protein, 409 aa, synthetic construct
  REGION 1..409: note = Synthetic
TLKMKLILDEATFNALREISEYSGKFYNMVNYDFRNGNFMSFYDMYDYYKDHTRCNYLQAHTYENALKQFSKDYKSYQGLLKNYKKNPKKHNQPSIPRYKHANNPMDAIFAKTAIRIREGKLLLSIGKKMKKEKQIKSLQIILPEKVLALLEDKNIKMIKFQYNLKTNEFTTLVIYEIEEKPLKKTGDLMSIDLGVKNLAAITFMNQKHQYLIDGNVLKCQIATYNKWLKEAVSKEMKNTGSKYFKATKKVRKKFKNKKNYIKSYIHRASRKIVDIAIDLDVKTIVIGDFKHIKNKNKIKYFVEIPHGNLKEQIAYKAKLEGIEVVFINEAYTSIVSSIDLEKVNQSNANKKRRITRGLFKSSKGIINSDINGSLNILRKYDRYKNIPMLIKLVRDKGYQEYPIRLKVV

SEQ ID NO: 1283 - protein, 419 aa, synthetic construct
  REGION 1..419: note = Synthetic
TFVCDFKLNEIQEKIIKEIKWHCSKVYNTFNYAIREGKVDVSKIKRVNEDGGKIYKNYRDENWHSKYLHSHTLQQIILNCIRDHKSYLALKEMYEKGDKDIKEKPQMPRYKNNGKMQITFTKQGIRIEGRTIKLSISRKMQEKFRVKSLNFLIPKRLEKLVNLESIKMIKIGNITEEKCKMYIIYEKEEKVIEDGSNIMAIDLGMDNLASCTNMNNNKTLIIAGERIKSKIGYINKEIARLEGIQMKTTGSKDFKNTRKINKLYEQRRNYTKTYMHKASRMIMNYAKENACSTIVIGDIRNIKQNMKNNKRFVEMPIQNLVKKIEYKAKLEGIEVEKIGEEYTSGVSSIDKEEISRKYYNKARRIKRGLFKTNSGKIINADINGSLNILRKYIKEMFSPDLEIAMGIGREQRPLKKRVA

SEQ ID NO: 1284 - protein, 458 aa, synthetic construct
  REGION 1..458: note = Synthetic
VYKYYGNFTAKENYIFRQLVFNSSMIYNKVNWYFLNHKFNSKLQPQIVRYLTKYDEHGKYFIQQECGEIISGLINDWKSFFAAREEHKKNPKKFTGKPRRPKCKKVKDKMNEVIFDERTILGLPGIKHNRKNAKGVIKNNKISFSLSKKAKRKFKMKNLEVNLSNFKFPKGLNKNLSNLQQVRICYDKKNERFYLAFIYRIEASSLDANNNDIMAIDLGQNNLITGVFNKSSYRFILDGKELKSKIAYVNSRMARLQSKEMKKLKNSKKFKATKKMKKLYNYWKNYTWTYIHKCSNKTVKKALKNKCNTIVIGDFKGIKRNKKRMKYFATIPYITLINQIKYKAKKSGIKVVMINESYTSGCSCIDDYEISKECYNKKRRKKRGDFVTNNGFHINADVNGAYNILRKYLNNNIPQCLIEDTYKNLYLTYLNMYLGLKGNAALTSGVNRIIYSPVLRHL

SEQ ID NO: 1285 - protein, 354 aa, synthetic construct
  REGION 1..354: note = Synthetic
LDNYQKQQIKNMLLDNSQLYHEAYLWKQSHKEPFQTSVRYLDFVPERLHKECAIRTIKRATKADKEVKYRYRNIYINPNRFTNNQIELNNLIIPFDIDTNKINILSAWIMYKNKEYYLDLEIGKSGKHHMIAIDVGVDNLGACVTSFGDSFLVDGKKLKAYDYYCLKKINFLQGINSESKKIDKIKHNHYHYLRTYCEKASNIVKQYCIDNGIDFILMGKIPTKKSLSYHTFMGMDYKRDNITAFGMSLFVKNIKHICKVNKWEYSCIAEDYSSQCSFYDDESVKQRDKHFGRRVHRGLYRTKDNNYVNADINAAYNFFRKYVDNIDNKKKKIIQWKNCKQNLKLHTRRVRVID

SEQ ID NO: 1286 - protein, 344 aa, synthetic construct
  REGION 1..344: note = Synthetic
IIELQLTKRQKNQLKKMEREYQKCYHDYHSDLIGIELVAWGHDYLKTLSLDMITSIIHGNDIFSCTANAYKDGEIHIKNIIIPYQKNELYDIQCIYFFFLLNHPYMKVVLDQKKKKKYKNILSMDVGVDNLGACASSFGDTFLMDGTKLKAWNYYYLKRVNNYMGICKESKHISKLKEKNYRYILSYCKKASDYLQRYCLLNQIDLFLIGKIPIKKKLSFEKFMSMEFKRDNVTSFSMSLFIYNVKEMCWKNGIECESVPEDYSSKCSFYDGESVKLHDTYMGKRTTRGLFRTGHYYYVNADVNAAFNFYRVYIKQNQRIQSAMNWNDCKQSLRLHPVRIKIMD

SEQ ID NO: 1287 - protein, 454 aa, synthetic construct
  REGION 1..454: note = Synthetic
KLLRCLTIALTDVPEEYKIALGYLTYHSGRLYNQALYLLKNKLARVNMFDLYNKLNSSIHLKALQSRSAQIVLDQLVRAYRNWFEYLKNPQKFKGQEIKPPKFRKKTKPHRTLTYDRTGFKIVGTKIRLSLSKDLRKFLKEKHDIHIKYLWIETGLELREELIRNIQIVPKGNEFELHIVYSAEKETKEQEGNRAMVIDPNSENFMVIGIDGVKTPYIVDGRGLKSLLRKYLKKIAKLQSLKDNLKNKRLPYHRVEERINKLWTKVKRLLRHYAHTVSNLILELAIKHRVKEIWIGNSVKNKNRESNLNSIADQIWSLLPHGKVKEYLEYKAEPYGIAARYIDERYTSGVDSTLECGVCKENYTPEGRIKRGLFKTSRGYLNADVNAVRNMLKKLERFDQITAVAKPVRVRIFKSISVSSLYGQIGGRSRGSVNLPVVVRDTSGVQTHHEAPHL

SEQ ID NO: 1288 - protein, 457 aa, synthetic construct
  REGION 1..457: note = Synthetic
FSHVVRGWLNFFDYLKNPHKYPHPVKPPKFKSKKNCFHIVSFPRKDVKIDGSTITLCYPKNHRIGKGRRKKSDLNFISINTNLDLSQLDISEVNIVPKYGKFFELQIIYKKKKEKEKKKEEGKEKERKEINALITNHGNDVGNNNDKKERDLVCRKKIRRMALDPGVSNFFSVVIEGVKKGFLIDGKIWKSLTTFRLKTISELKSRLDSILNKAKKMAQDSLILFPAPYFLVHRLEQKIANLWYKIAKVNEDFAHKVAKYILALALKYNVKEIVIEDRFRNKNKPSGMRDIANQLWHLAPHGKVVEYLKYLCKEHKIKLKVRDERYSSGVDSTEGAVPTKTKTTKTRRGIRKKMKEYTPERRTSRGLYKSSLGIVNADINAARNIGGMRGEEGLREVERVYLYQKKRVNKGMGEREGKEKESESKKKGSPVERVEAVAVAKGNKVRLSFEPERINLS

SEQ ID NO: 1289 - protein, 400 aa, synthetic construct
  REGION 1..400: note = Synthetic
ANSRKISITSNKKKLPHRPVIYDKTGFKIEGNTIRLSISKELKQHLKEKHNIDIDYLRIKTGLDLSQLNILNIQITPYKAYGNITYRLNIVYEEQIEEIKIKTDIALAIDYGVSNFATVVIEKQPISYIVDGKGIQSILRKYLKKLAKWQKKRDNLLNKGLSTNRVDKILHRIQKRINNLIRDYAHKVSNLIVGLAKKYNVSTIVIGKLQDSKNKGSKLSSIIDQMLSLLPHGRVSKQIEYKASEYGIKVVLVDESYTCSRSFAQFKELSGVDSLKDVAVSKENYTPEARKHRGLFKSVKGFINADVNGARNILKKFKKSFHDNITGLKQTIRIRVFGKVKSSPKSVRVYGQIGVARCEVCFKSKMLNKDLKHTSGDHLSGIRLHQSSNLPEKPPTLVGV

SEQ ID NO: 1290 - protein, 395 aa, synthetic construct
  REGION 1..395: note = Synthetic
TRVIAIQLNPTKEQQIIIGHLTYSASKLWNVANYNIKNKTLKLKELKSKLKKDFWYKNLHSQSAQAVLEKLKTAWENCYKKHTKAPRFQPKDGHYPVRWKKQGIQISNDKIRLSFSKQTKQYLKDTHSIESDYLWISLPKNLSLSRVQEVEIKPHRIYGHTVYVMHIVYRKTIELDNTNRENIMAVDLGIRNLATVVTTNKTAAIYDGRELISRLKLFSKHKAKLQSAVKKSGQKTSKKLHYLIVKERNYVKDYIHKMSTFIIRQAQKERIKTISIGELSRDITNIDIGKRNNEKLHKIPFGKLCSMIGYKAKEVGIDVMLVDESYTSQTCCVCGRVDKSNRKYRGLYVCSCGNVINADVNGAVNILKRVSPNLTLGRSRGNLDIPVRVRVNDVL

SEQ ID NO: 1291 - protein, 252 aa, synthetic construct
  REGION 1..252: note = Synthetic
VKEVEIVPHDLYGQSFYVLHLIYRKVVNPGKFSKDKVMAIDLGVKNLATVVIQNERQSFIFDGRILLSKLRWFAKKKASIVSEIANQGLKNCKRLARLTVKEKNYVKDYMHKISRWIVELAKEKSVSRIVVGDLSKGITKIDIGDRVNQQLHRIPFGKLVKMITYKVEELGIDVELINESYTSQKCSVCGVIKKSNRKYRGLYVCSNCGIVINADINGARNILFKVVPNPERSRDSGLGNPRRVRLINPLLS

SEQ ID NO: 1292 - protein, 293 aa, synthetic construct
  REGION 1..293: note = Synthetic
CDGIKVVDSKLRLSLSKQTREYLKEAHGIESKYIWVALPKDLPLDSVKQVELVPHHRFGHISYTLHIIYRQTFDEKPAVDPGKHLAIDLGVLNFATCVSEDGSFIIDGRVLLSKLRLINKRTAHLKSILDRQNIKTSKRLHRLHRYRRNYLNDFVHKASKAIIDYCLENRIGTIVVGKLSHGITEIDIGSINNKKLHQMPYGKFLSKLKYKADQVGIRVIEVDEAYTSQTCSVCGAVDRSSRLHRGLYVCKHCGSVMNADTNGAFNILKKVSPSPKRVGVGALASPVRLRLVS

SEQ ID NO: 1293 - protein, 705 aa, synthetic construct
  REGION 1..705: note = Synthetic
RIAICLVMGHSASVRTHGHEIIPHFQQEIVETDMQSPFVGLGISPFHGTAVFQQYHIVFLLIHVRQCRLVDIEERADLPVMYALVLFLHLLVQFQIGIPADDVLRVVAMDVLVPVVEQERDSLLVLAYRCATCLGIAVKGEQVGLAPVPVRMQCHEQPVERADGDAARIEFRKALACGVEPVSSGIRRFVQSRGKQLYLSLLGILFYLRFLFHTPIFLSVTGLLDASRPHDGLLLSVVVILRSHLAETVALDEHGIGQRVQRQGTGTVGVRHRGIKLHRAGHVVYRGNKGIALQYRIHNTWIERLIGHMCYAASKLWNVCNYERQHYKETGMEQYPDWYYQKKAHKEDLWYKQLPSQTAQEVCKLLDKAWKSFYALKRSGGIETPRPPRFKQESIPITYMQMGIVHERDTDRVRLSLPKALKKYMEETYQIHENFLYLENKIFRGMDQIKQLRIYPPEKGECKVIVVYEISEREELSQNGHYLSVDLGLHNLMTCYDSGNGNTFILGRRYLALERYFHKEIARVQAQWYGQQSVKEIKHPVTSKHIRRLYQKKQNSVTDYLHKITRYFAKYCREQGITCVVAGDIRNIRKGKDLGHRTNQKFHNLPYNRLYSMMEYKLKMYGIRFVRQEESYTSQCSPLSPEVEKRYAQPCNRKQRGLYRDRNRKYNADAVGAYNILRKYLSVSGEKKELSVTGLKTPEIIKVAV

SEQ ID NO: 1294 - protein, 652 aa, synthetic construct
  REGION 1..652: note = Synthetic
SKKTSIKVSQEYANVIGHMCYAASKLWNVCNYERQHYKEMGMEKYPDWYYQKKSHREDLWYKQLPSQTAQEVCKLLDKAWKSFYALKRSGGIENPRPPRFKQESIPITYMQMGIVHEWDTEKVRLSLPKALKRYMEETYQIHENFLYLENKIFRGMDQIKQLRIYPPEKGECKVIVVYEISEREELSQNGHYLSVDLGLHNLMTCYDSGNGNTFILGRRYLALERYFHKEIARVQAQWYGQQSVKEIKHPVTSKHIRRLYQKKQNSVTDYLHKITRYFAKYCREQGITCVVAGDIRNIRKGKDLGHRTNQKFHNLPYNRLYSMMEYKLKMYGIRFVRQEESYTSQCSPLSPEVEKRYAQPCNRKQRGLYRDRNRKYNADAVGKGIGVAVLDTGIFPHIDFGSRISVFRDFTGVRRSPYDDNGHGTHVSGILAGDGTASGGKYKGAAPGCSIAALKVLDRFGNGSREDVMRAFRWIMEFGSIYHIRIVNISVGTTSRDHKEQTDLLEGVEKLWDLGFVVVAAAGNQGPGAGTVTAPGSSRKIITVGSSDMLNGRKAVSGRGPTFDCVCKPDLVAPGSQVIACAPGLPYSYGLKSGTSMSTPLVSGGIACLLEKDPRLSNVEVKMLLRENAEDMGLPRNQQGWGKFNCEKLLAG

SEQ ID NO: 1295 - protein, 413 aa, synthetic construct
  REGION 1..413: note = Synthetic
TPPVSFWISSQGQSFSNRIQTYISRRSYMVIMGSPFFSVMYFNLVFRVSRVFTFPRLLMQKLSLSFLSGWLRKKHIFFSCRRTSSSQTKSGISRPPRFKQESIPITYMQMGIVHERDMGRVRLSLPKALKKYMEETYQIHENFLYLENKIFRGMDQIKQLRIYPPEKGNCKIIVVYEVPDQEELPQNGHELSIDLGLHNLMTCYDSGNGKTFILGRKYLALERYFHKEIARVQAQWYGQQSGKGVKYLATSKHIRKLYKRKHDSVTDYLHKVTRYLAEYCREQGITCVVAGDIRNIRREKDLGHRTNQKFHSLPYNRIYIMLEYKLKRYGIRFIKQEESYTSQCSPLSPKVGKRYAEPSKRKERGLYRDGNRTYNADAVGAYNILRKYHSVSGVKRELSVTGLKTPEIIKVAV

SEQ ID NO: 1296 - protein, 415 aa, synthetic construct
  REGION 1..415: note = Synthetic
SKKTSIKVSREYANLIGHMCYAASKLWNVCNYERQHYKETGMEQYPDWYYQKKAHKEDLWYKQLPSQTAQEVCRLLDKAWKSFYALKRTGGIETPRPPRFKQESIPITYMQMGIVHERDTDRVRLSLPKTLKKYMEETYQIHENFLYLENKIFRGMDQIKQLRIYPPEKGSCKIIVVYEVPDQEELPQNGHELSIDLGLHNLMTCYDSGNGKTFILGRKYLALERYFHKEIARVQAQWYGQQSGKGVKHPVTSKHIRKLYKRKHDSVTDYLHKVTRYLAEYCREQGITCVVAGDIRNIRREKDLGHRTNQKFHSLPYNRIYIMLEYKLKRYGIRFIKQEESYTSQCSPLSPEVGKRYAEPSKRKERGLYRDGNRTYNADAVGAYNILRKYHSVSGVKKELSVTGLKTPEIIKVAV

SEQ ID NO: 1297 - protein, 362 aa, synthetic construct
  REGION 1..362: note = Synthetic
LKNPGAYRHQSRHVLKKENIPVAYMQMGIVHEQGSGSVRLSLPKALKIYMEKTFGIHEKFLYLENKIFRSMDQIKQIRIYPPEKGTSRIIVVYEIPDPEILPDKGHYLAIDLGLHNLMTCYDSGNGKTFILGRKYLALERYFHKEVARIQSVWYGQQSAKGIKYPRSSKHIQRLYKKKQDAVTDYLHKITMYLTEYCKKQGITCVIVGDIGNIRKNKDMGHMTNQKFHGLPYNRIYIMLEYKLKMYGICFVKQKEAYTSQCSPLSPEVTKKYAAPSNRKKRGLYRDNTETYNADAVGAFNILRKYLSVTGEQKELSVKGLKNPEIIKSSCIAEKQAVVVLWTHPENKALTRLLRCSGNSVAE

SEQ ID NO: 1298 - protein, 696 aa, synthetic construct
  REGION 1..696: note = Synthetic
THETTIVLNKNDANIVGHMCYAAYKLWNVCNYERNNYKNLGLEKYPDWYYQKSKHKDDLWFKSLPSQTAQEICKLLDKSWKSFYRLKESGGIENPGTPRYKKDKMPITYMQNGIQHENGSYNVRLSLPKKLKEYMAHTYDIRAAYLYLKNPVFSNMDIIKQIKIYPPANDGTSRILVIYEVEDVLPEEDNGHYLSIDLGLHNLMTCYDNVGKTFIIGREYLSLSYFYNKEIARVQSQWGRIQAAREMEDLKTSKHLQKLYRKKNDCIKDYIHKMTRYITNYCVKNDIHTVVIGDIKGIRKERNLGRKTNQKLHSLPYARIYMQLKYKLKILLSKEYMRRIIIIENSGKVNFGGGQKITLQVAEILSKTCELVFVDFAKGTRFEQMINEKFPDSSKVLLKGRSFFFPFKYLNWLLDLVVLTCLFPGNLRKIKYYVTKKTLIYVTTKKGLLYAYMMKVMYGVPFIYHAHLVENTKSIFYFLYRSCLKKAEMSLCVSKAVYDTIKLPNKILLYNPNINDKGFKGRKNKDKFVVAAMGSLIKIKGFEYYIKAADKVSEKLPVEFRLYGEGPLHDTLETLSNGKVKFMGFSENIMNELYESIDIVVVPTIIPEALPLVLVEAKSVGLPAIVTNLGGQAEIIRNGIDGFLVPVGDSLSIKQYIEMMVKDRVLYNKLAEESYQSVSLFDYDLFKSTILKIFIV

SEQ ID NO: 1299 - protein, 415 aa, synthetic construct
  REGION 1..415: note = Synthetic
SQETTIVLSKNDANIVGHMCYAAYKLWNVCNYERNNYKDLGLEKYPDWYYQKSKHKDDLWFKSLPSQTAQEVCKLLDKSWKSFYCLKKSGGIENPRPPRYKKDKMPITYMQNGIQHEKGSLSVRLSLPKKLKEYMDLTYGIRAAYLYLKNPVFSNTDMIKQIRIYPPASEGTCRILIIYEVEDVTPVQDNGRYLSIDLGLHNLMTCYDNAGRTFIVGREYLSHTYFYDKEIARVQSQWANIQNARGVKHPRTSNHLQMVYQKKNNCIKDYIHKLTRYITDYCVKNEIHTVVIGDIKGIRKENDLGRRTNQKLHSLPYARIYMQLEYKLKMEGIRLIRQEESYSSQCPPQSEEVSVKYAEKKNRKKRGIYIVDMVIYNADAVGAYNILRKYHAVSGRKIDMPITGLSNTNIVKVAV

SEQ ID NO: 1300 - protein, 447 aa, synthetic construct
  REGION 1..447: note = Synthetic
ARKLKIEVTEEQHCYFSHMSYAASKLWNLCNYEKYNWKELGLEEFPNWYYQKKKWKNNFWYKLLPSQTAQEVCKVLDKSWKSYNTLTKKKRIKNCKPPSNKKTPMPITYMQNGMKHNGDTVRLSLPITLKQMVKESNGIDKNFIYLQHKVFSQVDNIKQLMIFPPQNGRCDVVLNYEIEEPKLFPDNGKYLAIDLGIHNLATCYDSANSKTFIVGREYLAINHYFHKEIAKAQSALAKKSISQDYILDGRGVSLDQGSAVTVSAESGLSSDHVSVLAKQPQYTSKRLKNLYKKRNNSIQDYLHKLTKFITNYCVENEINTVIMGDLTGIKNRITNGDKKYNQKLHELPYEKIRILLEYKLACKGINFVLQNECYTSQCAPNTPSVERKYANKSNRVQRGLYVSEGNIYNADAVGAYNILRKYCDEHEIKKTFSIKGLTSVKVFKIKR

SEQ ID NO: 1301 - protein, 280 aa, synthetic construct
  REGION 1..280: note = Synthetic
MIFPPQNGKCGVVLNYEIEEPKLFPDNGKYLAIDLGIHNLATCFDSANSKTFIVGREYLAINHYFHKEIAKAQSALAKKSISQDYILNGRGVSLDQGNTVTVSTESRYLAKQPQYTSKRLKNLYKKRNNSIQDYLHKLTKFITNYCVENEINTVIIGDLTGIKNRITNRDKKYNQKLHELPYEKIRILLKYKLACKGINFVLQNECYTSQCAPNTPSVERKYANKSNRVQRGLYVSEGNIYNADAVGAYNILRKYCDEHGIKKTFSIKGLTSVKVFKIKR

SEQ ID NO: 1302 - protein, 432 aa, synthetic construct
  REGION 1..432: note = Synthetic
SNKKINYESAQKVKDYLKNGNAGKLYTFTNFFIKNGYIKSESELEHRGGNVFTHCPFHYDKTPSFSFSEKRGICNCFSCGFGGTYIDLVLKYENDVNGRNLSYYGLLDDFLKNDSIMQATLGFSTVYTTYNIFKDGFEFKPFKPKRLKESYVPSHYLELANKIKRDGRPKEDIFEFILSMQANVPARTIYYQLYGGQDVDHVTTGNIDDDRSFSTVTSPQDGSDSFSQSEILDGRGVSLDQGSAATVSAESRLSSDHVSVLAKQPQYTSKRLKNLYKKRNNSIQDYLHKLTKFITNYCVKNEINTVIIGDLTGIKNRITNRDKKYNQKLHELPYEKIRILLEYKLACKGINFVLQNECYTSQCAPNTPSVERKYANKLNRVQRGLYVSEGNIYNADAVGAYNILRKYCDEHGIKKTFSIKGLTSVKVFKIKR

SEQ ID NO: 1303 - protein, 422 aa, synthetic construct
  REGION 1..422: note = Synthetic
VRKEIIVPTEEQALVLSHMSYAAAKLWNIANYERKHWKELGLTVYPDWYDQKKRLKTHLFYKNLPSQTAQRVLKKLDESWASFFALQKSGGVENPNPPRYKQDKMYVTFVQNGIKMIDKSTLRLSVPKQLKVYLHTKNGLEVRYLFLKIGRLSGLRNVKEVQVSFDDGQLKLLLVHEVKLPDERGNNGRYLSIDLGLKNNFTCYDSANVETFVLSGLLAKTHWFDKEIARLQSISDAQQAAKGEQYPKKSKRVLRLYKRKNDVQADFLHKSTRFLVNYCVHHNINTIVVGDWTNIRENKDGSTKNWGTKGNAKLHGFPYRKFYKLMRYKCALAGIRFVVRSEAWTSQCPPDSLGIAREFAEKAKRVFRDMYCHNGVLYNADAVGAFNILRKFLFDEKLALDKTNTTEHKLFSLRTPRRVHVA

SEQ ID NO: 1304 - protein, 495 aa, synthetic construct
  REGION 1..495: note = Synthetic
TYQFEIKVNNKLGIILGHLTYAASKLFNVGNYERKEYKSLGFDTMPNWYDQKKRLKDNIWYKSLPSQTSQEILAILDRSWKSYLTLHNKWEKKNKDVPMKGSKNAPQPPYYKKDGYHMNINYLSNGFKVIDDKIRFSIPKKLKEHLNDKYQINDNFFYIKLKRHFDDIKQIEFSYLDKDRYKVYVIYEKDIKKQVEDNKHYISIDIGVKNLLSVYDNNGSSFIVSGHSLLNTNYYFSKKIAYYQSLFDKCYPTHKKGEVTKRVKHLYDMKNKRIKLALHRATKTIVDYCLSHDVSKVIIGDLMGLLETNKEFTNNKEKHRFNQNVRAINFSKIYRHRFNQNIRAINFSKIYRLLDYKLKLVGIELIKVNEAYSSSCSPNSLNVCKEFANKSNRVYRGLFKEYSNVYNADIVGAYNIMRIYRQKNNDNFLMPKVGLSNPSKKYIPVTDQFLNEDCVNWNGKAGNVGISGRNYPTGDELITLINQFMTKMLGNSIAE

SEQ ID NO: 1305 - protein, 443 aa, synthetic construct
  REGION 1..443: note = Synthetic
MLDYMCLQASKLWNIANYERINYESLGLESEPDWFDQKKRLKTNEHYKMLLAQSSQDLLKDLDLAWKSYHVLNSNNKAANKPSFKKYGQHSVVKFAYHSIKLIDNSVLRISLPAGIKRIALSKYQKSDNYIYIKLKRKIVGIKSVSISHLRPGTFKISISYEMDEPKYKQDNGRHIGIDLGVANLFAVYDNNGSSFIINGSSFKNTIYYFSKKIAHYQKILKASYLHNDASKAYSSQRIRSLYKTRHGRINYLIHATTRRIVNYCKENDISIVVVGDMKGIKNNCSFGHVSKQQFYSVAFARIVKVLQYKLDIIGVRLVKVDEAYSSQCPPDSISVSKQCRVKHRRKKRGLYKYKGQIYNSDCLGAFNILRIYYQNKNESIRSLDYRFISNPKNECIPVTMDFFDYFPCLDMKYLVGVAGRNYPSGDDLMIFLHEHLKLSAEA

SEQ ID NO: 1306 - protein, 430 aa, synthetic construct
  REGION 1..430: note = Synthetic
AKYFIHKPNQTQQIVLGCLAYASARLYNIGNYQRKNWSKDSDKEYPDWYKQKKQLKENFWYKNLPSQTAQETLKILADNWDSFYQSKKDYQNNPDKYTGEPNPPNYKPKDSKFNFRYLNNGFKIIDGKLRLSIPKQLKKYLKEEYSITNKFLWIRVPNELLSSNRDVLNSTTRIEFKPLSDDTYKVILTYKVDTPTIKEDNGNYLSIDLGINNLMTCYSNQNQESFIIDGGQYLAINRYFDKKIKHYQSILNGQGKKTSKRIQQLYKKRRKQLFHLIHSATKKVVDYCIKHNISRVIVGDIKNIRDDADLGKQNNQKLHKLPFDIIYHQLEYKLNLQGITLIKKSEKYTSQCSPYSKKVTKKYGDKSNRIKRGLYVDKNNNQAFNADSVGSFNILRKYLQQRRKGKDITLQVKGLSNPVKYSWNDHQFAA

SEQ ID NO: 1307 - protein, 275 aa, synthetic construct
  REGION 1..275: note = Synthetic
VPNELLSSNRDVLNSTTRIEFKPLSDDTYKVILTYKVDTPTIKEDNGNYLSIDLGINNLMTCYSNQNQESFIIDGGQYLAINRYFDKQIKHYQSILNGQGKKTSKRIQNLYKKRRKQLFHLIHSATKKVVNYCIENNISRVIVGDIKNIRDDANLGKQNNQKLHKLPFDIIYHQLEYKLNLQGITLIKKSEKYTSQCSPYSKKVTKKYGDKSNRIKRGLYVDKNNNQAFNADSVGSFNILRKYLQQRRKGKDITLQVKGLSNPVKYSWNDHQFAA

SEQ ID NO: 1308 - protein, 417 aa, synthetic construct
  REGION 1..417: note = Synthetic
TKKIIYKPTEQELNILNAFAFSSAKLWNIANYEKKNYIELGFSSFPNWYDQKKRLKDEFWYKNLPSQTAQDVLDRLQKSWKSFFELQKSKGIKNPKPPRFKEKNSLFNFTFLSNGFNKISKDTINFSIPKQQKEYLEENFSFDSKYLSLKIKEFSAVTEKIKTIEFKPLKDKTYQINVVYEIEGAQLNKDNQHYLSIDIGIKNLFTCYDNEGKSFIVSGTKYLEISHYFNKKIAHFQSIASKQQIASGKKYASTTKRIKNLQNKKRLQLHHFFHCATKEIASYCEKNDISKVVIGDIKNIREDNNLGKVTNQKLHALPYEKLYSYLQYKLRTKGIELIKVKENYSSQVSPFAPKVSKTYATKAKRKHRGLFIDNHVKFNADSVGAYNILRLYEEKQNKGLLMPIKGLSSPIRIKVAV

SEQ ID NO: 1309 - protein, 434 aa, synthetic construct
  REGION 1..434: note = Synthetic
TRQRVIQFELNPNKAQDIVLNALTYAASKLWNVANYERMQWKKESGNPYPNWYEQKAKLKENFWYKNLPSQTAQELLKQLDEGWKSFYKLKKSGGIKNPKPPRYKHSNFNIRFLNNGFTVSDGIIRLTVPKQQKEYIKQKYDLDINFLYIKVPNEYKNFVGKIKIIEIIPIPKNKKYRVNIIIDLPTIEYKQDSNIYMAIDLGINNLMTCYISTGKSIIISGRQLLSINRYFDKQISYYQSIANAQQAACQIQYKENTKRIQQLYTKRRKQVNHFLHTATKQVIDFAEQEGVSKIIIGDISHIRDDKNMGKKNNQKFHKWPFKKVEELLIYKAQDRGIFVEKQDESYTSQCSPYAEEISKVTAQKSNRKYRGLYVVNGKVFNADCVGAYNILKKYLCRIGKTNPAVVALDTPEMYRWNGHHFIENPKLANLLAM

SEQ ID NO: 1310 - protein, 258 aa, synthetic construct
  REGION 1..258: note = Synthetic
VNIIVELLDTKAKEDNAVYMSIDLGINNLITAYINTGKTYIISGRQLLSINRYFDKEIAYYSSISDSQQAAKGIKYPKQSKRVQQLYAKRRKQINHVLHTATKSIIDIAEQNNVCKIIIGDITNIREDNNMGKVNNQKFHKWPFKRIKDCLMYKAENKGIAVEMQEESYTSQCSPYTPQVSKKYAKKSNRKYRGLYKNNVNTQIFNADCVGAYNILRKYLCRMEKSIPAVVGLDTPRMYHWNSQGFFANPKLSISMEM

SEQ ID NO: 1311 - protein, 417 aa, synthetic construct
  REGION 1..417: note = Synthetic
RAVVQRTDIVRLLLNVEQEELLRHIGDQTARLINMENYRRRQIFYAKRGIDTGVKVARELAKTKAEYREVKEVLGSKNFDETLRKVAEAWKSFAELLKEKKKGKLPLWLNPKPPGYRKMDGTRIPIIIVRADNYRIDAERKVIHLGYLNISIQFTGKLRWLAKPGAKRGRMEITYDPVKKRWYAHISVEVKIERSSGNGIMGIDLGREVLVATVTSGGEALLYKGKVLKSDYYYFEKKIAAIDSALSKLEEVDRNALAEERRRLFEKRRKRRDQIFANIASHLARFAREHSIGAVFIGYPWNISQKKGNKGNTNLWGYGKLVIRLALTLENYGIAAFAVNEDNTSKKCAYHNIDIKREPRGLIRCPHGHTIHSDVNAALNIMLRGLRLLGIEAELPKHIKVLSFLATPSKTIPIKAP

SEQ ID NO: 1312 - protein, 417 aa, synthetic construct
  REGION 1..417: note = Synthetic
AVRVWRCETLRLLPTPELEGLLWRVGDAAARLVNMENYRRRQRFFGGKGIDYSWRSAWDMRKTEYAEIYRLLGSANFHEACRLIGEQWKSFAELLKAEREGGLPPWMNPRPPGYRKRSGERVPIIVVRFDNYRVDLGKRVLHLGYWNMDIPFKGKPRWLIKPNVRQGRLIITYDPIERRWYAHISVRVPLERGHSGSGFMGVDLGREVLVAAVTSDGTALLYKGKALRSDYFYFEKRIAEIDKALSDPRAEEADRAVLWEERKRLYEKRRRRRGQTFANTASHLENEAVRRDVGVVFIGYPWNISQDKPGKGNTNMWGQRRLMLRLATTLENAGIPAFAVSEDGTSRECAYHKVEVQRKPRGLVHCPHGHTMHADVNGGLGIMLRGMEALGIKAELPRQIRVLSFLATPGGVKPINP

SEQ ID NO: 1313 - protein, 404 aa, synthetic construct
  REGION 1..404: note = Synthetic
EAEVARADIVRIEAEGEMAKVLAQLAKICRDFVNEEFQRRSKIYEETGEIDVSIMPAYRNPSYFSFRRILGSRNFDEALRFVSEQYRNFSKLLEMKRRGELPEYIDPKPPRDFKPLALFVRFDNYEIDSEQRTIKLGYYGEVLSYKGNLRWFARGRQGRLMIKYNEAKKRWYAHIASYVTLRRDNVVGYKCGVDLGQRFLAVVATENGYVLMYKGSKLAWDYLYFKEKISQSDRLYSIGEIDLDFNVERKRIHNYKMKVHREEAFKNLASHLIRTLKQLGIAEIYVGYPHNITKDKPYEYNVSFWSYWKLMERIAITAENYGIAVYALDESGTSKHCAYHGIEGQRSPRGLLHCPMGHTIHSDVNAALNILKKAGGKLPTMFKTQSFIVTPRGIKPVESRAGGC

SEQ ID NO: 1314 - protein, 415 aa, synthetic construct
  REGION 1..415: note = Synthetic
EAVVWRADTVKLLPTPEQVDLLLRLAKATRALINIEHARRRALYERLGIIDCSVKGAYHDPSYAGFKEVLGSKNFDEALCLAAESWKSFKELLELKEQGRLPAWLDPKPPKRLKRLLIAVKHDNYRVDAQNKVIRLGYYNTEIRFQGELRWWWQRLQQGRLIIAYDDVKCAWYAHIASEVKLKRDMRAPLKCGIDLGQERLAAAVTESGVALLYRGTVLKSEYHFLKMEVSELDKRARFADFDVQVWLEKRRWLYRRFRVRKRELIKSMAAHLVKMLRELGATEIYIGYPRDIKRDKPTEGNNAWPYWQTIEEIARAAENYGIAAYLVPEENTSKTCARHGCEVVREPRGLVRCPYGHIMHADLNAAMNILKRGGGRVPEQVKVLSFTPTPDGVYERRKRRENRAEPDSPAQRAG

SEQ ID NO: 1315 - protein, 352 aa, synthetic construct
  REGION 1..352: note = Synthetic
PLVVRQDGYAVEEENRRLMIKDFNVELEFTGGLRRGGKGLGLRYTATRPRTLGTPLSSSRWALRQVRMATSRGISLTVRVDPSKSRPPGETRPLRSTRAKTSALASAVVRDGACLLYGSVRTEEDYFYLERRISELRSPADKAENMGEQEARDGLDREKRRLFKKLTSGLLHLNRDSASYPVKALHELGASAICLGYPLSAAREEGNELTVNLWFYRKLMDAVKSRAQEYGVKALEVVEHGTSKQCAYHGGEVQRYPRGVVSCPSGHKQRSDLNGALNILKKATNSVVSTVRRTPSFLVDQNTVAPVKGCNPRDLGEPSPFRAERRSGEGPLRCHGIGMSNDEGASSFWRES

SEQ ID NO: 1316 - protein, 461 aa, synthetic construct
  REGION 1..461: note = Synthetic
RTDGYRTNIVRLRVYPEDLKELVYTALRYDECIEFLNELRRELYEAGLLDSRGFAWTRQEAHLAFGEYLKGNVHLVARLNEYAWRGFMALKKLEEEGRLPRGIRVRMPGRGRRFGRCLRLFVDSSYYRVLSRVVAEEMGMEVGENCSGVIVLNAPVKMAVGYHGVIRWSGAQSYMVVKIKDPSRVYAYIHVRVLEPSELEVAIYKGRRVVFGERYGLRSYDPLGSFRAWVDLGVRNLIAAVVEDGTALLYRTGILRSMYNYYRRRKRELMRLIEWLSRTTPNSPWIERYEEELEDLRERTFRKLRLVRRRAVRHFVDECWKLGVSRIYVGYPSWMNMDHPLSSIIMAYSETAWDIARVGEEYGIRVYAVDERGSSRRCSLCDEAHANGRIHTGLWRCPKTGLEINADLNSARNLAGRVSGVKPPLNGRLLSFIVTLEGVWPANQRRGPKPGNPPSHSPDEG

SEQ ID NO: 1317 - protein, 519 aa, synthetic construct
  REGION 1..519: note = Synthetic
ENDNKRALTVKLNPTRDDQIYLTSLIKTYTAIANKLNKDAFAKFKELTSNGEIRNIADLKDIKKEFNWWFNEYYKTQRRWITDNLGSNIADQLFKFLTAQYSNFFANYENFFKHKMEGRPSFPSLPELFQIRDRGVEVDFDKKILIIKLKGKQLRLKFQSDRLLYQGDPGSVTIKKVDGKFYAYIPFDFNPKIEEGKKAAIDIGLVNFLATVTEDGDVILVKAKQYTYTYSKYKDRIKELDRMIGNIRKHTLKMYVYPPKSFTYYHFLGFTNDRRIRKIIISLYTSRYDDKRGKKKKLTREDMTNIVKEIHKVNYRLRVRRLNFMKTIGHIKLFPKKSRYMNDVFQDLPILHKLEYERRKLYEKRDRTLRHIRRTAINALLRILKQRGVTHIVVGYPRYINKNRNELTVNLFQYRKTINDLKIIGQRYGMKVEELEEYGTSITCSICGQEHKSGRIERGLYKCEKTGKTINADVNGALNIFYKAFSKMPKQLKKTETIKLTFTPLQRNVTLSPLYYRKL

SEQ ID NO: 1318 - protein, 333 aa, synthetic construct
  REGION 1..333: note = Synthetic
NPHRYEEETLFYIGLARAKLISENEGYLILDDFDRGIKYVGRIRWEGKQGRLGIIYVNGRWFALALIEVGVEPSGSIRDMLRRLSISTWIYHHEKYLEAMYRRDERFRHLYITSIKFLAETLWSRGVRKLYIGYPYMLSQNNGNEYNTNIWWFRKIVLWIADIFMEYGIDVDIAPEEYTSQRYSIYGIRHKSGRIYRGLYMCRKNRKKINADINAALNIARKLGHWIKLTRKTESYVITLTSPRLQVVILIVIPFRWFIVSPIYSGLHPSFGGQLGWPEPPQSKNNITGKLKNTNIPSPKGTRLSVITHNGVRQIIPARLGNIRDQTIEKPSH

SEQ ID NO: 1319 - protein, 333 aa, synthetic construct
  REGION 1..333: note = Synthetic
LRIRYVGRIRWEGRQGRLEIIYVNGRWFALVPIEVGVEPPKSNKRGYVKPNYKDKKSRIVNPRSIRQKDPIVDREAFIDMGFNNLFAVTISDGSAMLIKGGTIKSEYYWWKREIAKYQSIRDVLRRLGVLTWIYYHEKYLDAMYKRDERLRHLYITAIRFLADDLYRRGVRKLYIGYPIMLSQNNGNEYNTNIWWYRKIVLWIVDIFMEYGIEVEIFPEDYTSGECSICGNKHKNGRKHRGLYECKKTGKKINADINATLNIARRLGYRVRVSRKIESYLVTHSGVKPLIPLQGANTRDPSIETPPLKGGGGVISNLMKPEPLVKYINHLSLD

SEQ ID NO: 1320 - protein, 337 aa, synthetic construct
  REGION 1..337: note = Synthetic
MLIRNDRYHVEPVSKNEGYIVLEDFDLRIRYAGRIRWEGKQGRLEIIYVNGRWFAHLPIEVGVDPPKSNLKGYVKPLYDNEEKKKKQRITNPKSTRLRDPIGYKEAFIDMGLNNLFAVVATDGSVMLIKGGSIKSEYYWWKREIATYQSVRDMLRRLGVSTWIYYHEKYLDAMYKRDEKLRHLYITAIRFLADELYRRGVRKLYIGYPIVLSQNNGNEYNTNIWWFRKIVLWIVDIFMEYGIEVEIFPEDYTSKECSICGIRHKNGRIYRGLYICSKTGKKINSDINAALDIARRLGYRIKIAKKIESYHVTHNGVKPINPHQRANTRDPSDRSPAH

SEQ ID NO: 1321 - protein, 546 aa, synthetic construct
  REGION 1..546: note = Synthetic
KPSNIRTVKLRLLPNGSQERRLRRIADATAKLWNELNYARLVQYRDGGEIDFKGTEHEFYHRYRGVLGVNAGQVISLNNWMWNSFFELSRLYKQGKLPKFYRKPSPPGFWKDKLLGKRELRILVRNDRYYLEPINNGEGYLVLKDWGLRVRYAGRIKWSGRQGTLVIKLEDGRWFAYVPITVGEKPARSNPRGYVRGIYEKIQIEKPRGGNKAFIDVGLNNLFAVVFNHSDTAILIKGSTIKAEYYWWKREIKTYQAIRDWLRNHGFESWRKYHAFYLHAVFKRRERLRHYYRTAIRFLAKTLWQMGIDEVFVGYPYMVSQDNGNEYNTNIWWYAKIINWLGEVLEEYGIKLNVVNEYGTSKQCSICNMEHENGRVKRGLYVCKLTGIKINADLNAARNIAKRAGYEVPTPRKILTYIVTTNGIKPITPKEGVTTKTPKIKPRPSGRGGGHTVLFGEPVKDFDRARELAMISDAVLVVGSSLTVYPAAYIPLFVKEMGGKVIIINMEPTELDYIADVNIRCKAGDAMEKLLEKIIEMKKEGTTVTQ

SEQ ID NO: 1322 - protein, 463 aa, synthetic construct
  REGION 1..463: note = Synthetic
QDENRRTIRLRLLPSGSQERKLRRIADATARLWNELNYTRLVQYREGGEVDFEGTEHEFYHKYKDRLGVNAGQVINLNNNAWKSYFELLKLYRQGKLPKFVNKPSPPGFWKDKVLGERKLIILVRNDKYYIEPVNGGEGYIVLKTWGLRIKYAGRIKWSGKQGTLVIKLEGNRWFAYVPITVGEKPARSNPKGYVRGIYEKIQIEKPRGDNKAFIDIGLNNLFAVVFNHTDVAILIKGSTIKSEYYWWKREIKTYQAIRDWLRNHGFESWKKYHTYYLHAVYKQHERLRHYYRTAIRFLAKEVHKMGVDEVFIGYPYMVSQDNGNEYNTNIWWFNKIINWLKDVLEEYGIKLNVVNEYGTSKQCSICNAEHENGRVKRGLYVCELTGIKINADLNAARNIAKKVGYKTPTPKKILSYIVTTNGVKPITPKKGQQSRPPKNETRPKRAGKGVIHKNRCTITNLY

SEQ ID NO: 1323 - protein, 475 aa, synthetic construct
  REGION 1..475: note = Synthetic
KKESVRTVRLRLLPTKQQDKRLRKIADTCSKLWNEVNYVRRKAFFEKKKVNIEETYREYYERYKKLVGCVTTQQVLNKNNEAWNSFFKLLKLKKEGKLPPFIKKLTPPGYWKDKTLGKRIKRIIIRSDRYYIEQVNNGEGYITLKDFNVKVKYVGRIKWSGKQGRLEIKHEFNRWFAYIPIEVGEDPSKSNPKGYIRGGCDKIQRGKPRGEEAAFVDIGLNNLFAAVVTSGDAILVKGGVVKSEYYWWKSEKRNTQATRDLMRNNGLKIWERFHHRYLRALFKSSERLRHLYRTAVRFLAKELHERSVKSVYLGYPYMITQDNGNEHNTNIWWFRKITQWLYDVLKEYGIELFIVLENNTSRECSVCHVIHENARVHRGLYVCSVSGRKMNADLNAATNIAYRVGYVVSVKKVESFIVTHNGVKPVTPLRRGIAQDPAVKPRPSRRGEGHPPQLCGVASVCQADQRRRISRRNPC

SEQ ID NO: 1324 - protein, 473 aa, synthetic construct
  REGION 1..473: note = Synthetic
DVEAVRAVTLRLHLTPEQERELEALADLCTKMYNQANYELRQLFFAGRLTKAANEVLKRWYNIYRPRLGSYVSDAVVKQLLIDWSNFFKLLEAKKQGRVPGWLKPRPPGYKKDKVTGKREKIFFVRDRGYRVIPLSPKRGKLIISIAGRRLTLEYSGRLRWRGRQGTLVIRKLNGRWYAHIPVEVGVPAPREKKYSYMFINGERDKVQLQGPRGREKAFIDLGVNNIITCVTTGRRALLYRGGPIKAEYEYWSKEASLWQRVHDKCRNAGLPTERWHLLLKKAYEKRQRRVRNLKRAAVRHLVRELWLEGVSEIFAGYPYMITHSKGNKWNNNIWGYRQLLTWLAVAAAEYGIRVHVVDEHKTSITCSRCGYEDKEARVFRGLFRCPRCGLEINADINAALNIARKAGYTPPTPTRIETYTPTHQGVTPLNEKKKSTRPETITPRRVTGSRPPVSQGGCIDPLNVRKGAAAGI

SEQ ID NO: 1325 - protein, 417 aa, synthetic construct
  REGION 1..417: note = Synthetic
MRRSNTVRIIAGKETKAKLTVLGKAFVNCWNEVNKLRLEQYKNHEPVDFNKTEKVVYEKFKAILHGANVQQVTRKNMGAWKSFFELSKKKKEGELPKWMKPKPPHKKKDNLFLLIRHDRYKIEGNEIFLMDFNLRLKFIGKLKWVGKQGTLEIFFDNARKKWYARIPMVVKVNNKPKGKMKAGIDLGVVNLATVAVEDGSWMIFKGGSVLSEFKKITKRILIEEKRLSRHGLKTSRKLEMLYKKRSLLLKNAREGLAREIVESLYDKGVGEIYVGYPKGIAQDKGNERNTNFWSYSAIIKRIKEVAEEYGIKVKLVDEENTSKTCSLCGEIHENGRIKRGLFKCPRTGKVINADLNGAINILHIPESVEDRGKWLKEQPLVYRWTNGAGWVTTSYEAMKMKAVNHEPVIRLEGTIAF

SEQ ID NO: 1326 - protein, 445 aa, synthetic construct
  REGION 1..445: note = Synthetic
MKRSVTVKLQPSKEQEKALFELAHASAVIWNKLNYQRLKQFKEFGRIDFNGTEKEAYHEFKNWIGGSTVQQLARKNAESWRSFFALNRKKKNGELPEWFRPKPPGFVRGENGRKVFLIPLRNDQYRIDGNVVELRRLGKFGRLRIQFKGKIYLRGKQGRLEITYDEVKRKWYAHISITVKEKLINDEWVKVPKQPLGDLSAGIDLGVNNLMAVYVENGKSFLVNGRPLKSIAFYWRRRIADYQSKLNKSGAKKSKKLKRMHEKAKLQAKHYINTVVRQTVERLYQLGVSTIVVGYPKGISRNSDKGARQNFLLSHVWRFNTVIKRLKEVAEEYGILVVLVDEVFTSQLCPLCGQRHSNGRIFRGLFKCRGEGVVMNADLVGAFNILRKVVEKITPSLPGLSAGRGNWGKTLPEGFSEPPSKRVMRITPQTSPPLARGFPDGNPTL

SEQ ID NO: 1327 - protein, 364 aa, synthetic construct
  REGION 1..364: note = Synthetic
LARKNAESWRSFFQLNKKKKNGELPEWFRPKPPGFVRKENGKKLFIIPLRNDQYRIDGNGIELRRLGKFGRLRIQFKGKIYLRGKQGRLEITYDEVKRKWYAHISITVKEKLINEEWVEVPRQSLGSLSAGIDLGVNNLMAVYVENGESFLVNGRPLKSIAFYWRRRIADYQSKLNKSGAKKSKKLKRMHEKAKLQAKHYIDTVVRQTVERLYQLGVSRIVVGYPKGISRNPDKGRRQNFLLSHVWRFNTVIKRLKEVAEEYGIQVLVVDEAFTSQLCPLCGQRHTNGRIFRGLFKCRREGVVMNADLVGAFNILKKVVETITPSLSALAGGRGNWGETIPEGFSEPSSKRVVRITPQTSPSLS

SEQ ID NO: 1328 - protein, 437 aa, synthetic construct
  REGION 1..437: note = Synthetic
MKRSVTIKLQPSKEQEKILSELAQATAVIWNKLNYQRLKQFKEFGKIDFNGTEKEAYQEFKNWIGGSTVQQLARKNAESWRSFFSLNKKKKSGELSEWFRPKPPGFIGEENGKKLFIIPLRNDQYWIDGNVVELRRLGKFGRLRIQFKGKIHLKGKQGRLEITYDEVKRKWYAKISLTVEEKLIGDEWVEVPRQPLGDLSAGIDLGVNNLMAVYVENGESFLVNGRPLKSIAFYWRRRIADYQSKLNKSGAKKSKKLKRMHEKAKLQAKHYINTVVRQTVERLYHLGVSRIVVGYPKGIARNSERGKKQNFILSHVWRFNTVIQRLKEVAEEYGIQVLLVNEAFTSQSCPLCGQRHENARFVRGLFKCHGEGVVMNADLVGAFNILKKAVRTITPSLPALAGGRGNWGETVPEGFSEPSSKGVMRITPQTSSPLVWG

SEQ ID NO: 1329 - protein, 440 aa, synthetic construct
  REGION 1..440: note = Synthetic
MKRAIRVKLQPSKEQERVLFELAQAIAVVWNKINYQRLKQFKTFGKIDFAGTEKEAYHNFKDWIGGSTVQQLARKNAESWRSFFALSRKKKAGKLPEWFKPRPPAFIRERNDKKLFVIPLRNDQYKIENNILELRRLGKFGKLRIQFKGGRIYLKGKQGRLEITYDPVRRKWYAHISYTVEERLYREGWVEVPRQPIGNLSAGIDLGINNLIAVYVENGESFLVNGRPLKSIAFYFRRGIAKVQSKINKSGTKKSRKLRKMHLNAKLQMKHYIDTMVRRTIERLYRLGVSKIYVGYPKGISRNSNKNKKLNYLLSTVWHFSYVIKRLKEVSEEYGIKVKLVDEAFTSQVCPLCGQRHENARLVRGLFKCHREGVVMNSDLVGAFNILKKAARTITPPSLPALAGGRGGNWGVATPRGGVRRTQFELGSDEDPPQTSPPLG

SEQ ID NO: 1330 - protein, 436 aa, synthetic construct
  REGION 1..436: note = Synthetic
MKRTVTLKLQPSKEQEKTLLELAQATAVIWNKINYERLKQFKEFGKIDFGTTEKEAYYTFKGWVGGSTVQQLARKNAEAWRSFFSLLKKKKSGELPEWFKPRSPKFVKEGNERKLFIIPLRNDQYKIENNTIELRRLGKFGRLKIQFKGRIHLKGKQGRLEIIYDAVKRKWYAHVSYTVEEKLTNGEWVKVPREPQSNLTAGIDLGVNNLIAIYIENGEAFLVNGRPLKSIAFYWQKRIAEYQSKLNKSGYKASRKLKRMHQKTKLQARHYINTAVRQTVERLYEIGVSKIVIGYPKDIARNSDKGKKQNFILSHVWRFNTVIQRLKEVAEEYSIEVLLVDEAFTSKLCPLCGQRHSNGRIFRGLFKCRREGVVMNADLVGAFNILRKAVRTITPSLSALAGGRGNGGKTLPEGSKTRFNLGLNETPQTSPPLVRG

SEQ ID NO: 1331 - protein, 393 aa, synthetic construct
  REGION 1..393: note = Synthetic
LPKWFKPRPPNYLKDGGNRKPLIILRNDQYKIEDNKLILKGLGKFKRLEIQFKGRIHLKGRQGRLEITYDEVKRKWYAHISFTVEEKLTRKGWVKIPRQPLGNLSAGIDLGVNNLMAVYVENGESFLVNGRPLKSIGFYFQKKVADYQSKLNKSGAKTSRKLRKLYERAKLQARHYINTAVRQTVERLYHLGVSRIIVGYPKGISRNSNKGKKQNFLLSHIWRFNYVIKRFIEVAEEHGILVEVVDEAFTSKLCPVCGRPHEGARFTRGLFKCPATGLIFNADLVGAFNILKKVVKTITPNLGGLYAQGRGNGPETGPSGGTETGDGSRWMRARKPPRPLKPRPSRRGGGQEEITVKPFSRELSKEFLRRGFEEVGMEVEEELIERAVELLDG

SEQ ID NO: 1332 - protein, 437 aa, synthetic construct
  REGION 1..437: note = Synthetic
VIRTAVLRLEPGPEEEEKLRLVCELASKLWNELNYRRRRLFFEGKLTQQKLYETYKEFYYMYNRLLGSATTQAIIAKNDTAWRSFFRLLALKKKGRLPPHIARASPPGYRKRSRRRRRLWLALRQDQYRVDTERGIVEIRRLGVAGVVRVRYRGLIHVRGRQRGAEIWYDHDRRRWYIAISYTVEEKLIHGRGWVRVPMKPRGSLEAGVDLGVDNLLAVYVENGEGFLVNGRPLKAESFYWQRRIARYKSVLDRADGAGSTSRRLRLMYRRWRARIRAYIDAAVRRAMEELYSRGVARIYVGYPRGIARRGDGNGKLNFERVHVWTYGLLLRRLKEVAWEYGIEVVEVDEAYTSQRCPLCGAVHPRARVHRGLYICPHRRLAMNADMAAAYNILAKGTKRTITPSPEALTHPHRLGVGVTPPRPGARGGAYPRPSNQ

SEQ ID NO: 1333 - protein, 442 aa, synthetic construct
  REGION 1..442: note = Synthetic
MRRTSVVELVVDKSSEESLKLLCSLSSKLWNEVSYARRRMFFEKKGADLKATYKEHYEKYKTLIGSATAQQILNKNEDAWKSFFKMLKLKKEGKLPPFITRANPPGYKKKNSKRLLWTVLRKDQYRVEGGRIVLKGLGAIGRIELKYKGLIHLKGEQGRLEIHYDQDRRKWYAHISFEVSEKAVRVVLASVPRKPRDNLVAGIDIGINNLMSVYVENGLAKLVNGRPLKAISHYWRMRIDEYQSTLNKHGLKTSRRLRSMYSKWRRQVKAYIDSRVRQAIEWLHSVGALVIKVGYPKYIAQENGNFSNFHIWTYGYLLRRIYEVAEENGITVVYVDEAYTSSKCPIRGEGCGKRIKRGLFKCTKLDKVFNADLVGAFNILITPSPNWDRGNGLETQPGIEPSERGNAIPNLFALAGTPCTLGRGGGQIFLVPCPPSFKLIGL

SEQ ID NO: 1334 - protein, 508 aa, synthetic construct
  REGION 1..508: note = Synthetic
LKRTVIVEIIVDERIHDVLLSIANILAMAYNEINYMRRKLFFDKELTPEAMRQTYNEVYRKYADEYKTADGHCLLGSNTLQAVLNLSDDNWRAFFMLLKEKEVLPSWFEVNPPGYSKSGKRRIPFIRLKSRQWELSGDTIIIKGVPAFGLRAVLKIKGRVHWSGERGELMLRYDIDRKKWYAYMQFYGTEKLYSDGWRTVPLPLPGSGIAGIDLGVNNLFAVYGITSDGKHVSALFNGRPLKSIWFYWKHKISMLQSLLSGLRTSRRLRLMHRKAKMQMKNYIDRQIRKLYRWLREHGIGTVVVGLPHDIAHEKGNEYTERIWMYGYILKRLKEVAEEEGMEIRLVPESYTSSTCPLHGKDCGKRILRGLFKCTKLGKVFNADLTAAYNILVRGISITPSPRKRDRGNGLKTQPEAESKKCGSKPPRSGGNSRPLGWGGGQLASETLMYTSSYYAMKYSLLKTCLKRLVGSFVYFQALPLNIVGVDGSPVRAIAMMSEKEIREEIMAF

SEQ ID NO: 1335 - protein, 445 aa, synthetic construct
  REGION 1..445: note = Synthetic
VSVLKRTVTVELIQTKEQEEELKELGNLCSKLWNQVNYERRRQFFNGEHSVDIKGTYNKWYNEYKEKVGTITAQQVLNKNNEAWSSFFSLLRAKKEEKLLLPFIKKINPPGYWKDKKKRKLIIVLRKDQYKIDKEKQEIELRHLGKFEDLKIRYKGEIYYRGEQGRLEIIYNSMLRKWYAHITIKANERLDRKTGKWMKVPLTPKGNLVGGIDIGINNLLAVYISDGTQVLIKTRVLKSISYYFMKLISMKQKLLSLYKQPFSNEIRRLYVKWKRELNTIIDATVRKVVEFLYNKGVSLIKVGYPKNISQKKGNFLVANVWSYKQVMDKLRDVAEEHGITVEFVNEAYTSTTCPIHGNGCGKRVSRGLFKCTTSNKVFNADLVGAFNISIILSPNDGGVEGTTTRGIGISWGKTTPLVYTWTRGSGLVVPASYDSMRLKRIDQNL

SEQ ID NO: 1336 - protein, 448 aa, synthetic construct
  REGION 1..448: note = Synthetic
VRTNVVRLLLNGFQGRRLRRLADACARLYNEVNYERRQQYFSGNGVDFRGTWVKYYEKYKGILGVNAQAVLQKSNEAWNSFFHLLRLKKEGKLPPYMNHISPPGYWKDRESKKRKLLLVVRQDRYIVDEQNHKLILKDFNLEVKFTGRLRWFGRQGRLEMHYDESKGAWYACIPVEVGVEEAKTGRRSKFIVHGERKVIQVESPKGSKVASIDLGISNLASVVVSDGTWLLYKGVRAKEDYFYLQRLISRIQSLRDTLKGKLLSDAVDELNHEVRRLHGRLRRRLVHLYRNFASHLLKQLHELGVSTIYLGYPFNIAQERGSKFTVNMWSYRKLMEAIELKTQEYGIKVYEVVEYNTSKYCAYHGVEVKRQPRGVVSCPMGHKLHSDLNGALNIMRRAIEKIPPVIKKPLSFIVEHNKVAPIKGCNPQDLREPSPLKGGEEVSYFLIS

SEQ ID NO: 1337 - protein, 447 aa, synthetic construct
  REGION 1..447: note = Synthetic
RRTNVVRLLPNGAQERKLQRIADATAKLWNELNFERRRQFFSSKGVDFRGTWSKYYEKYRGVLGVNAQAVMQKNNEDWNSFFTLLNMKKEGKLPPHMNHVSPPGYWKDRETGKRRMIIVVRQDRYVVDEQRHVIILKDFNMEIKFVGRLRWFGKQGRLEIIYDDTRNAWYAHIPVEVGVEETRTGKRSKHIVKGERRVIQIESPKGNKVAAIDLGINNLASVVVSDGTWLLYKGVRAKEDYFYMQRLISRIQSLRDSLKDKLLDDAIDELNHEMRRLFGKLMRRLLHLYRNLAKHLIEQLHELGVSTIYLGYPFNIAQQKGNKFTVNMWCYRKLMEAIELKAQEYGIRVFIVIEYNTSRYCAYHGVKVKRQPRGVIHCPFGHKLHSDLNGALNIMKKATGKIPITIKKPLSFTVDHNKVAPTKRGNTQDPNKPRLIGRERGQAENPG

SEQ ID NO: 1338 - protein, 287 aa, synthetic construct
  REGION 1..287: note = Synthetic
MEIDFAGKLRWYGKQGRLEIHYDETRNAWYASIPVEVGVEITKKGKESKYIIYGKRKNIRVELPKGNKVASIDLGINNLASVVLNDGTWFLYKGVRTKEDYFYLENKISQVQSLADKTKNIGEYEAYDELLKEKKRLFKKLMRRLLHLYRNFAFHLMKKLHELGVSTIYLGYPFNIAQDKGNKFTVNMWSYRKLMMAIELKAQEYGIKVYEVIEYNTSKYCAYHNVEVKRNPRGVISCPLKHKLHSDLNGALNILKKATGKVLSTIKKPLSFIVDHNRVAPVKGCNP

SEQ ID NO: 1339 - protein, 278 aa, synthetic construct
  REGION 1..278: note = Synthetic
LVWFGKQCRLEIVCDDTVNRRYAHIPVEVGVETTKKGNPSKHIVHGERKSIQIASPTGNKVASIDLGINVLASVVLDDGTWLLYRGVRAKEDYFYFEKKIAEVQSLADQAKKLGEYEAYGELARERRRLFKKLRRRFLHLYRALASELVKSLHSLGVSTIYLGYPYGIGQDTGNKFSVNVWSYREIMSAVELKAQEYGIKVYEVVEYNTSKYCAYHSVEVKGQPRGVVTCPEGHRLHSDLNDALNIRKKATGSVVQAVGRPLSFVVDHNRVAPVCKGV

SEQ ID NO: 1340 - protein, 457 aa, synthetic construct
  REGION 1..457: note = Synthetic
KRTNVVKLVVDKEMHEKLRDLAVVTAKCWNEVNWLRMQQFKRGERVDFAETEKEVYEKYKHVLKVNAQQVARKNAEDWRSFFSLIKEKREGKLPKWFKPRPPGYWKGEDGKYKLVIIIRNDRYVVDEDKRIIYLRDFDLTLRFKGKLKWHGRQGRLEVIYNEARRSWYAHIPVEVEVVAEAKGNLRAGVDLGIVNLATVYVEDGTWYIFKGGGVLSQYEYYSKKIRRVQKLLARHGQRTSRRLRLLYDKRSRFLKHALNSMVRKIMGELREKGVGEVVVGYPKDVARNHGNKLTVNFWNYGYTIRRFKEVGEELGIRVIDVPEPNTSKDCSLCGDAHEGGRVERGLYKCPRMGKVINADLNGARNILHIPESLGSVSRGQLTVRDRGNGLKTQPVVYRWTSRAGWVRTAPTSNEAMRMKAVNHKPMNRPKGTPTLQDGEEVSSALARGGRRLCGILS

SEQ ID NO: 1341 - protein, 412 aa, synthetic construct
  REGION 1..412: note = Synthetic
NRTNLVLLMPTCEQDQQLRSLAETSARLWNLANYERRQALFKSQRVPTYAQQCKRLKDADTFKQLGTCKAQALLMKLREAWGSYHALKRLKRRGQLPPHIRRVRPPRYMKDRQTRRLVAESIYVRNDGYKQQEDVLTLSKDLRVPFRAGDLWVGKQGRLELHYDRLRGKWYGHIPVRVKWPRKGLPHQSTRKRASIDLGICNLTTCVVEGGDKAYVYSGRAVLSDWRYWTKQIASYESTLKKTNQRDSSKQLSRLYRTRRRRLNHAVKAMLRDLYDRLETHGVTDLIVGDLKHIRDNANHGKVGNQKLHNFWPFAQIRQRIHELGEEYSIHIRFKSERGTSKRCSVCGKKHKNGRVKRGLYKCPDTNVRLNADVNGANNLLEPKVAADSGSRPLALPMLLKWNSQEWEVSAA

SEQ ID NO: 1342 - protein, 252 aa, synthetic construct
  REGION 1..252: note = Synthetic
LHYDRLRGKWYGHIPVRVKWPRKGKPHQPTRKRASIDLGICNLTTCVVEGGDRAYIYSGRAVLSDWRYWTKQIASYESTLKKTNGYNRSKHLSRLYRTRRRRLNHAVKSMLRDLYDRLETHEVTDLIVGDLKHIRDNANHGKVGNQKLHNFWPFAQIRQRIQELSEEYSIRVRFKSERGTSKRCSVCGKKHKNGRVKRGLYKCPDTNVRLNADVNGANNLLEPKVAADSGSRPMAWPMLLKWNSQEWEVSAA

SEQ ID NO: 1343 - protein, 280 aa, synthetic construct
  REGION 1..280: note = Synthetic
MDEEAIAISKDLKIPYQCGQLWVGKQGRLEVVRDDLRDKWYAHIPVEVQNEPPSGTCSKRASLDLGICNLATLYIEGERPFIYSGRAVLSDWAYCTKKIVEKQSQLPKRKYISKQIRIAFRKRQRRLRHTVHSMLRSIFETLESQCIGELIIGDLNGIRQNANHGKSGNQKLHNFWSFNLIEKRIYELGEEYGISIRKVSERDTSKTCCLCGKLHNGRIERGLMVCHETHQSINADVNGAVNILKVAVNRSLVRSTNEETSGSRLMAQPLLLRWNYNEWR

SEQ ID NO: 1344 - protein, 314 aa, synthetic construct
  REGION 1..314: note = Synthetic
MPGYLKDRDTKQTVVRGFYVRNDCYRLDRKHSTITIIGKNMKLRYATDRVREGKTGRLDVIYDRLKDAWYAFIPVDVVVAPAKQAVVSGKPEKVGSVDLRICNLVAFYAEGERPVVYSGRAVLSDYVYRTKKIAEMQSRLSEKQHTSRKMGLFYRTRTRRFKHATRAMLKDLFERMKQIGITKVAVGDLSGIRDGNNLGAHTNQKLHNFWSHAQTIQWIQHLCEDYGMDFAQVSERGTSKTCCVCGQGHNGRVHRGLHVCEENRVMMNADVCGAANIWNVAVKGELLPSTTRLPSSSRVMANPLVLRWDYAHWK

SEQ ID NO: 1345 - protein, 442 aa, synthetic construct
  REGION 1..442: note = Synthetic
MRPLTADDEQVLRDLLDASAALWNEINYQRLMRYNDKDGFEDEDVWDADTGALEGKYKAVLGASTAQTVRRANTEAWRSFFRLKKQFHDESNTSVTEHPEPPGFRGNKDDGRVLKGVVRKDAYSVEWGDRSRLEMVVGEQLRDRHNSPKSRLRLEIVGDPNWSDYEDQGRLELWYDETDCTFRASQPVTVSDDARATPLANEKAALDIGANNLVACTTTTGQQYLYEGRELFQRFRETTREIARLQSKLPEGRYSSKRIRRLYRKRTRRRDHAQETLCRDLLEQLYGEGVDTVYIGGLTDVLETHWSAETNAKTHNFWAFKQFTERLAWTADEYGISVEVRSEAWTSQECPQCGSTDRTTRQQDTLTCPCGFEGHADVTASETFLERHTEKAVRPMARPVRFEWDDHEWSESPRSPARESPKEQRTDPSTVPRDGNVVSGDS

SEQ ID NO: 1346 - protein, 308 aa, synthetic construct
  REGION 1..308: note = Synthetic
MYSVEWGEYSRLEILVGQDLKDEYGLGHRERLRLEVRGNPNWKEHDKQGRLELFWDENAQTFRAFQPVTISEDNSRLAHSLADETAALDIGANTLVACTTTTGTQLLYEGRDLFERFRETTREIARLQSLLDGGRYSSHRIRSLYRRRTRRRDHAQDALARDLIERLRGEGVSTVYVGASTDVLDTHWSVEANQKTHNFWAFRQFIDRLACTAEEYGILVEVPSEAWTSQECPNCGSTDRTTRHRDTLTCPCGFEGHADLTASETFLRRHQNSLSSDWRTRHSVSRQRQTTVTRPMARPVRLKWDNHS

SEQ ID NO: 1347 - protein, 288 aa, synthetic construct
  REGION 1..288: note = Synthetic
ELYYVDVSETFRAFQPVTIDNSRLAHPLADETAALDIGANNIVACTVSTGDQYLYEGRDLFKRFRETTQRIAELQSKLREGRYSSKQINSLYRRRTRRRDHAMDALARDLIGRLYDEGVSTVYVGDLTDVLETHWSVRTNTKLHNFWAFRRFIKRLSCTGEEYGITVEVRTEAWTSQTCPNCGSTEDTTRHQDTLTCTCGFEGHADLSASETFLRRHETDVARPMARPVCPQVGTVTNGWSHHALPVPTRSTRTRKLPPWTRHSRDSQREETPAFTPGRMSYTRRPTG

SEQ ID NO: 1348 - protein, 461 aa, synthetic construct
  REGION 1..461: note = Synthetic
AFPKSTERSVSSPDAGWPYAKGVPAEPPVAPDRSPAAERGRAEKRCRHHDRVPTEHSVRLTARQRKPTTSVVGDQFRAFQPVTIDDSRLDSALADEAAALDIGANNLLACTTTTGKQYLYEGRDPFDRFHETTHEIADLQSELEDGRYTSKRIQRPYRRRTRRRNHAMDTLARDLMERLHRWRWDGLRRRPHGRPRDPLSVRTNEKLHAFWAFRRFIDRLACTAEEYGITVEVRSEAWTAQECPACGSREDTTRHRETLTCSCGFEGHADLAAPETFLRPYESIGRPMARPVCLKWDDHSWSALTRRDRLVRTPEIGDFWGRHHALTVSTRSTETGVSASRRKSLAWWFGMSRDPQREESHGFSRGGDVNVLVVLRFRERQQNRLVVAVQFDHLPCLLVLVFRSAGSDLVLAVRQVLELDESVVSLGFPLLARPEKRVVGRLEFDGDAVDRIPVVVLYEHG

SEQ ID NO: 1349 - protein, 445 aa, synthetic construct
  REGION 1..445: note = Synthetic
KRTNQFDVHPRSKTEREVFKHWLDASASLWNETNYARRQAFIEDDESVWNADTGKLDGKYKGVLSSSVAQQIIRKNSEAWRSFFSSNEKYHAGTLAERPSPPGYWGNEENRRVLRTYVRNDQYTIEYGECSRLEVPIGSELKDDLGLNRNQRLRLEVAGDPKWRGEQGRLELVYDELADTFRAFQPVTVPDSRLDSPLASEEAALDVGANNLVACTVTTGSQYLYEGRDLFEQFRETTERIAYYQSLLENQRESSKRIDRLYRKRTNRRDHAQDSLVRDLVERLHDEGVSTLYVGDIKDVLSTHWSPRVNEKTHNFWAFRRFINRLEDVCEEYGIAVEEESEAWTSQTCPECGEREETVRHEDSLTCPCGFEGHADLVASKSFLRQQHNTVGAMARPVYLKWNNHSWREHHSLPSGAVETTANEDYTNQSTTSSENIALEEAQND

SEQ ID NO: 1350 - protein, 346 aa, synthetic construct
  REGION 1..346: note = Synthetic
VSDTFRAFQPVTVPDSRLDSPLASHEAALDVGANNLVACSTTTGNQYIYDGRELFGRFRETTDEIARLQSKLREGRYSSKRIRRLYRQRTKRRDHAQNALVRDLVERLYDEGLATVYVGDLTDVLDTHWSVRVNEKTHNFWAFKKFIHRLACVCEEYGISLEAEPEAWTSQTCPECGDHETTVRHRDTLTDVSVWIRGARRPHGVRDVPSRKQRYGSQADGTARAIRVGRPRMVRETIPRMKVPKKCARTRKLPPWVGSRTPIGGILALQRGEDVKLGMRGGEGVTTRQSTVHYSADIAGAPTSVLGALCFVDYADVGGSLGLRAELVWLPGGLFLVHHSPSTARR

SEQ ID NO: 1351 - protein, 751 aa, synthetic construct
  REGION 1..751: note = Synthetic
VRRTNTFAVRPLSDNDERLLRDLLDASASLWNELNYERRQQFFDGESVWDTADYRKQYVDVLGSGTAQQVIRKNKSAWKSFFSAQDEWHNGEREERPSPPGYWGNEDDGRELRTLIRNDLYTLETSERSRVEIPVGDALKDEYGLGYHDRLRLEVAGNPKWDGEQGQLEIQYDETDDTFRAFQPVTVPDSQQDSPLASHEAALDVGANNLVACTTTTGQQYLYESRDLFDRFRETTEEIARLQSKLREGRYSSQRIRRLYRKRTRRRDHAQEALVRDLIERLYTEGVATVYVGDLTDILETHWSAEVNAKTHQFWAFRAFIDRLSYTAEEYGITVKVESEADTTRTCPACGEQDETNRDGDVFRCPCGYEAHADLCASRTFLEQQAGEIEVRPMARPVRLTWDDHCWSERPHSPDPVSPHRRPVRGNSHYTRRKRSNMSEADAENVLMEYYRRYVGDPDRTIDVYAGFGLFFAGIALGVIGVVVFLYSATLDPTALSTYAVREVAAVAGAVGLPALLFGIVVLLPVDRRMLYLASAGVAITLVGTGVFVWAYPHNWNVVVNPDYSAQVVAVYAVGLVALIGATGGALVAHRVERATGGAAAAGGGAAGAGGAGTADGAAATATDADGETVTEESVRADIERELDDAELTWGGVERSETRRLELNTSAVDEADVDTEQLSGSATETRTTSGTVNDAVSELKGLQGGEAKTDSGQGTDDQAAKLRELREQQRKEAEEADEDGSVVDRIKGLFG

SEQ ID NO: 1352 - protein, 406 aa, synthetic construct
  REGION 1..406: note = Synthetic
KRTNQFVVRPQSEQDRKLLHELLDASASLWNEITYERRQQYFDGETVWDTEDYRKKYVGVLGSATAQQVIRKNKSAWKSFFAAKENGEDSNPPGYWGNEDDGRELRTYIRNDQYTLKMGDRSRLEIPVGQDLKKKYGLGYRERLRLEVAGDPKWEGNQGQLELYYDERSNQSRAFQPVTVDDSRLDSPLADESAALDIGVNNIVACTTTTGQQYLYEGRDLFERFRETTQRIVELQSKLDNQHRTSKRIDRLYRRRCFDSARRQPNRRPRDTLVGADEREVAQLLGVPPVHRETRRYCRGVRDLDRGSIGSLDIADVSELRFNRGHDPAPGYAHLPVRVRRSRGPRSERDVHETARIGSTADGTARVPQVGRPYMVGDTTLSPSQRGAHKPEYPRIGESRPRGGST

SEQ ID NO: 1353 - protein, 407 aa, synthetic construct
  REGION 1..407: note = Synthetic
IRTNEFVVMPETDQDRELLYRLLDGAASLWNQLTFARRQQFFDGEDIWAADRFYDEYKGLLGSATAETMARVNDRAWRAFFSRRGRDSSAQPPGYWGNEEDGRDLRLFLRNRAYSLQWGQYSRIEFTVGREIKPEYGLTPNERPRVPIHGNPKWKGTQGELQIVYDDLTNGFRAYQSVTVDPKLERSSNGGEAAALDVGAVNLVACATTKGVQFLYDGTRPWEQFEATSNAIAQAQSKLPEGEHTSKRINRLYRRRSSRRDHCVDALLRDLVERVIDDGIQTIYVGDLTGVVRRTPWKSTNRKLTEFWANRRFTDRLGHLCDEHGIELVTVQEFDSSQECPDCGTVEGTTRDRDRLRCRCGYEGHADLTAARTLLSREIGKLPRPMARPVRFQWDNHRWRSTTDATA

SEQ ID NO: 1354 - protein, 464 aa, synthetic construct
  REGION 1..464: note = Synthetic
DRPQRTNTYTAEATSDRYRQCLFDWLAAQPPLWNQITYRRRQAYFSDNGDVWDADYTDLYDEYAPILGKATCQQIARKNSEAWRSHFRLLDQYHDDSDPTVTEKPSPPGYWGTREEGYELHGLVRNDLYTFDWDENWSTLEFGVGDVLEDRYDFEHNERVTLEVKGNPQWDGDDSRLELIYEEHADQLRVQHPVRIQPDNLREQREDAFTHTLDSENTTQAAAIDVGANNTLAVVTGNGETAVYHARPEFERFQSYSERIATLQSKLREEEYTSHRIQRLYDERSRKRDHSRDAAVKNVAEWLLERNVDTVYVGDLTDVLDTHWSAEVNEKTHNFWSHRQLLDRIELTLGDVGITVQEVSEADSSSECPGCRSSDVTRNGDSFRCHDCELDAHSDVAGAWNILQSEVGPMARPAALSAERDRDAPQEGAYWQWNEHDWIPAEFGEQSWSLDQPSLSKPASSQPG

SEQ ID NO: 1355 - protein, 687 aa, synthetic construct
  REGION 1..687: note = Synthetic
DQPQRTNEHTAEPTSERYRQCLFEWLAAHAPLWNQITYRRRQEYFADDGDVWGAEYTDLYDEYAPVLGKAACQQVTRKNSEAWRSHFRLLGNYHNDSDSTVTEKPGPPGYWGNREDGYELHGLVRNDLYEFDWDEDRSTLEFGVGEALEEKYDFEYQERITLEVRGNPHWEGDDSRLELVYDEAAAKLRVKHPVRIRPDNIREQRLDAFTHTLDPENTMQSAAIDVGANNTLAIVTTTGETAVYHTRPEFKRFQVLSDLIAELQSTLPDGQYTSKRIQRAYNERGGKRDHSRDTAVKHAADWLLERNVDTVYVGDLTDILDTHWSAEVNEKTHAFWSHRQLIDRLELTLGDIGISVEQVSEAHSSSECPSVEARMRQEMVIRSGATTASWTRTVTPSERGICYKMRLGRWRGPPPWLLDAAGTYLPMGRTGSGMDTTGNPRFLGNSRVRLTKPASANPQVHSRGNLLAGLPTEESHDFSRVEDVKRDPNRRKGSRRDNRPSDDVRLHSVRRVHAGRRVNRHATPARCRGDRSGEDHDAGLDNRLVRILLADRADEEPVRPGARSGWLEQRHRRGRRREPGSGRHRNGLWWVDPCPRVVRQPRRVPRDPWPDQSRRRQSISLTAGHGRTNDTDGPRHRDVARRPRRLRRSGRPYRENGTQPAARVVYEPSPPGRVGRLADRRPPRWVR

SEQ ID NO: 1356 - protein, 436 aa, synthetic construct
  REGION 1..436: note = Synthetic
LWNQITYRRRQAYFTEDTDVWDAEYTDLYEDYVPILGKAACQQITRKNSEAWRSFFELLDTYRSEDPSVTEEPSPPRYWGNRDDGYTLHGLVRTDLYTFDWDEDKSTLEFGVGEVLEEKSDFEYQERVTLEVRGNPQWNGDDSRLELIHDDTAGVFRVTHPVRIHPDNLEQQRLDDFTQTLDSENTSHTAAIDVGANNTLALVTSTGESAVYHARPEFERFQKYSERIASLQSALPEDRYSSERIRRLYTKRTRKRDHSRNAAVKHAADWLLEQNVDAVYVGDLSDVLEAHWSSTVNEKTHAFWSHGQLVERITLTLGDVGVSVNKVSEEDSSSECPDCDSPNVQRDSDEFRCHECGLEAHSDVVGAWNLLQEETGPMARPAALRAERRRDASQSSNGRGAYWEWNEHDWTLTDCEEQSRSLDQTRVSEPASSQLG

SEQ ID NO: 1357 - protein, 335 aa, synthetic construct
  REGION 1..335: note = Synthetic
MLLFAAENWNGSNCRLEISYDETSDCFRVKQPVEVQPDYVEQLRQVEFPSHTPSENAESEDRVAAIDVGANNTLTIITDTGDARIYHARPQFHHFQANYEHIATLQSHLPPDTYSSRRIRRKYGETYGQRDHHRDAAIKSAMQWLRSEGVDTVYVGDLSDVLDTHWCAEVNTKTHNYWSHGQVTEKLDETGTLAGVNVEEVSEAGTSSQCPCCGSDDVCRDGDELSCRECSVESHADIVGAALILEGEADVAVSEWFESESVRPMARPAPRRAERCRDGDQYTVTYLQWDDHEWTPLLSESVGTLGSFDQRGVSKPASSKEATAGCVANEGIPRL

SEQ ID NO: 1358 - protein, 472 aa, synthetic construct
  REGION 1..472: note = Synthetic
ARTNQYTASFPSETAKQVYCEFAAASDACYNSINHCRQQAYFTDDESVWDAPVRELRGEYVPIIGSGTFDQLERKNSDMWESFFEQLDKYHNPENQSVTEKPIVPGYWGSRSEGYPLRTLVRNDLYEFEWSDDRSTVEFTIGQALKHKYDYGHYERLRLDVQGEPRWTGKNGQLELCYDEDFDVVCVNHTVRQPELRTSGHSHTQQGHANRPETSSNAQFAAIDLGVNNTVTVVTSAGDAIVCNARGEFQRFHSLTDRIATLQSKLPDGVYSSRRIRRTFSLRGDRRDHHRDATIRLVAEWLCEADVEHVVVGDLTNVLSTHWRARVNEKTHAFWSHGGLLKRLEETFEELGVEWSEESESGSSSTCPACSSEHVERDGDAFDCLDCGYRGHADVVGAANLLVEHTEVSSSEVGLMAQPAGHDAGRSWRGDVEVTHLKWDDHAWTPTRTSEREHAGHSTNEASANPQVHSTR

SEQ ID NO: 1359 - protein, 468 aa, synthetic construct
  REGION 1..468: note = Synthetic
EEERTRTNTFALAPKAEWKKVCLIELLDSAAALVNIVTYHRRQTYFDDDQTRSDVWNAITKTEIRNRFRPVLGRAITDKMLDKCDEQWDAFFEQLDDYYDGEREDKPGVPGYWKDDGKRVLKACIRNDAYTVEWGEHSRIELALGSELKEKYGIPLNQRIRVPIKGNPQYDGHGGRLELVYDRSTESFTAKQPVTFLHDTTRATDSSDEGCVAAVDVGANNFVAVTTTQGHQRVFHARPLFDRFNHYTERIAELQSQLPENADSSQLIEKLYDKRTSHRNHAQDALVRHLARLFSEWGVEAVYVGKLDDVREKHWSATVNEKTDLFWAHGRFRRRMQTVLEEECGVSVEEKSEAGTSSQCPRCDEGTHVSRNGDVFQCGGCGFEGHSDVVGSENFLQSVVDGDVDLTGERPMARPVDSGQNGPERGHRKVPRLEWNDHCWRQRGHATKEEPTNRSTRKGNLASESGTA

SEQ ID NO: 1360 - protein, 717 aa, synthetic construct
  REGION 1..717: note = Synthetic
EEERTRTNTFHLAPRENWKRVCLIELLDSAAALVNIVTYHRRQAYFAPERTRNDIWNAVTRTEIRNRFQPVLGRAITDKLLDKCDETWDAFFAQLDDYYDGDREDRPGVPSYWKEDGNRVLKAVVRNDAYTVKWGKRSRIELALGSELKEKYGIPLNQRIRVPIRGNPQYEGHGGRLELVYDRDAESFTAHQPVTFLHDTTRVTPSSDGDAVAAVDVGANNFVAVTTTNGHQRVFHARPLFDRFHDYTERIADLQSQLSSDEYSSRLIEQLYDKRRRHRNHAQDALVRHLAGLFAEWGVGTVYVGKLDDVRETHWSAQVNEKTDLFWAHGRFRRRMQTVLADECGIVVRERSEAGTSSRCSRCGESDHVGRSGDVFQCGSCGFEGHSDVVGSENFLQDMIDDHVDIAGPMARPANTGVTRPKRSPQTGVPERGILPPGYRHSRITHGGIPPLQGWEEVNPEPRTHALCPPGRTTGMSLEADLERARGLSVGELADAIETVGFECTRCGACCKAVEGDDGREPHTATVFPDEVRDLQDAGDEPYDWRDVARPMPYGLAEGDDGPEGETFEWALQTDACGDCTFYRERESRSDSEGTCGDEPKDDDGTGVCTVHDDRPLICRTYPFSVVLDGETAAARPTGEAVDREGPVRAHECEGLGRDIAREDAEELAAALKERAVRELEEAIAVREGYEPTDAEGVVVHDSEGQKRPDGTPLDGR

SEQ ID NO: 1361 - protein, 327 aa, synthetic construct
  REGION 1..327: note = Synthetic
VELSLLSLEVAGRPRWTGKQGRLEIVYDRDTETFTAHRNVGDEDNPPRRRDPPQPSLATTDSGGEVVAAVDIGANNLAAVTTSHGDHRLYHGRPAFRTFHKHTERIAKLQSILGDDEWSSKQIRSVYHTRGEQRNHAMDALIRDLGEWLAEKGVTELIVGALSDVRKKHWSATVNEKTDLFWAHGRFRDRLSDVLEFEYDITVAEKSEVGTSSECPACESEDVHRSGDLLQCHACGREGHSDIAGSANFLRKHAAESIEIETSGSMARPVATGENTKVDGRQISVPCLEWDDHAWTVKHDGPSTKEAPANQSTSSDTGNVAPGVSDD

SEQ ID NO: 1362 - protein, 377 aa, synthetic construct
  REGION 1..377: note = Synthetic
LKRNSFDWDCTEILEKYKLLLDERIARQIVKKNDKTWKSFFTLKRMKEEGRLPKFFGRISPPGYWINPKTGKKKLMTIVRGRDYRIVGRYLHLFNGLKIRISGELRWQGWQGQLIIKYNEILKKWYCHQTIFVNDDAIPIPSKKQRKAFVDLGVINIITGWIEGERQAIAFSGRPILSSWWYWSKKISELQSKLYKNGLFTSKRLRRMFLKRRLQFRESINVIVHRFVKLCYKKGVDEIIVGDVTHIAERVRSGKKVNALIHNFWCFRYIMNRLRTTAENFGIKVTLVKESGTSSRCIRCGSRNVMRRGRLFRCLDCKLEAHRDVVGVINIASSYLNRKIEGVHPHPIVLRFSSVLQHKEPYISDFERFKKLIEVSS

SEQ ID NO: 1363 - protein, 427 aa, synthetic construct
  REGION 1..427: note = Synthetic
DRTNVFRLKPTKQQEQMLIKLCRLSVALWNSINYKRRQSLIKGSFTWDVSDVIGRFSDVLGKSITWRIVKKNNSTWKAYFALRKKNKGSKVGLPRYWKSRDKNASWDTILRTEIGRNDYEIVWGTNHRKSYLIINWPPGEQLKIRINGNPRWSGYFGRIEIVYDGVTKRWYCYQFVASDHVPELKKNSTKKCYVDLGVVNIITSWIEDSSKIIAYSGRPLLGDWWYWTRRIARYQSALNKRGIKTSRKLRLLYRKREKRFKQTINTIVHRFVKYCHENGVSEIIVGDIHNIREDIKTRSKKINALLFNFWEYNYIINRLKVTAENFGIDIRFIDEKGTSSYCIRCGSRNIIRKGRLVKCNSCGLEAHRDVVGVLNIAMRYSNKRPRKLIAHPFVISILPRPFLPKKREDDNIIKLDIQPTDFMRNIK

SEQ ID NO: 1364 - protein, 256 aa, synthetic construct
  REGION 1..256: note = Synthetic
LQKVAKKASLFRAGRWYAYQSAGVNQSRRTISSKKAFVDLGVVNILTAWIEGERQPIAFSGKSLLADCWYWTKKIAHYQSIAMKVNKYYTAKRIRKYYRRRKLRFRHAINTIIHRFVKICYGKGVTEIIVGDVIGIRDNDDKGAKVNAMTHNFWSFRYIINRLITTAENFGINVRLVKENNTSSICPRCGSTNAYKHKRLFKCLNCGLEAHRDVVGVLNIAHLLNAGGFNEALAGPELPRAHPLVAQTSLLEILAL

SEQ ID NO: 1365 - protein, 420 aa, synthetic construct
  REGION 1..420: note = Synthetic
RRVNKFRLRPTKKQEKVLFSLCEMSAVLWNRVNYKRRQSFFAGEIDWNTEEEYNEFKRILGSATTQQIIRKNDEAWRSFLKLLRLKQQDKLPKHVHKVSPPRYWKNRRTGKKKLMTIIRNDCYRIEEVRGKKWLILPKGLKIRITGCVKWRGKQGRLEIHYDDLTGRWYALQSVEVEVEEVRSTKRAYADLGVINIITACIEGERQPIAFSGKPLLADWWYWSKKIARCQSHLKQVNNKNTSKRLKRLYRKRKRRFRHNINTIVYRFVRLCHAKSVGEIVIGDITHIRDNNDNGSKVNSMIHNFWSFGYIMERLRTTAENFGIKVKPVDEAYTSSECPWCHSKNVKKHKRLFKCLNCGVKAHRDVVGVLNIALLHGEGFNGVLAHPLLLRVDDAPESKSSMWVRMSVRPSEARITPLLVR

SEQ ID NO: 1366 - protein, 260 aa, synthetic construct
  REGION 1..260: note = Synthetic
LTVKWQGKPKWVGWTKQGQLTIHYDNVTGKWYARQPVEVEPPHQPLSHRRAFVGLGVINLLTVALDGARQTLVYSGRSVLADWWYLSHRIDRLKSLAKTINHRKSTHRIRRLFRRRRLRLRQYVNTVVRRAVADLWAHGVSQLVVGDLTGILAVKSGGRKAHAMTHNCWSHRYLMQRITEVAEEYGIVVERVDERGTSSKCPRCRSKRVTRLGRLFKCQECRLEAHRDGVGVVNIGLAQGAAFPGEVVNGAVACPLEVSG

SEQ ID NO: 1367 - protein, 395 aa, synthetic construct
  REGION 1..395: note = Synthetic
KRTNSFNIKWDNPEEIRDLAKGCAVLWNKLNYKRRQSFFDEEEEFGWSSDEFYDDFKGWVGSTTAQQIIRNNNSAWKSYFSLLKKYKNNGDDMERPSPPGYWKDRKKDELELKIIVRNDSYTIEDGTVKLPFGRTGEVVGKPHWEGKQGALWIYYDRLDECWRARQPVEVEPRHQPSGDKTAFVDLGVIYPITAKIEGVDKTIAYNGRPLLSKWWLYNKRIDKAKSKLKEENGKYTSERLKRLFRQRKRTFKDKIRKIAHDFIERCYQADVDTIVMGDLTGIRENKEKWNKKADSMVHNYWSHKYLIDRIRWTAENYGMDIELIDERGTSSRCPRCGSEEKVRRGRLYKCKNCGLEAHRDAVGALNISFVYQGRTNEPTDRGSINRVMAHPEVVS

SEQ ID NO: 1368 - protein, 393 aa, synthetic construct
  REGION 1..393: note = Synthetic
LEVKFKDDKRAFSLGDNCTILWNILTYKRRQSFWKHKFTWASKREYNAFKKLIGSATAQQTIRKNDEAWRSFFRQLKLLKQGTLKGVTYANPPGYWKDKQGNRIPRIIIRNDCYTINGQRLKLPLGLKGRVHGKPEWQGKQGTLTLKHDALDGQWNAQQSMVVTRPRFRKNGERAFVDIGVRCIIAGWTQDAKQVIAYSGNPLLADWWYQTSRITQLQRMLPKGQHTSHHIQCLYRLRQRRFHQAVNSIVADYTQRCLNENVSTIVAGDLKHVLDNNNHTAPVNAMLHNFWSNQYILQRLKCTAENHGIRVRTRSERGTSSRCPWCRSKHVQKRKRLFRCLSCGREAHRDVVGALNIGLVSCKERGVINRVMTHPRLIQTRNLQVNLEESPDL

SEQ ID NO: 1369 - protein, 442 aa, synthetic construct
  REGION 1..442: note = Synthetic
RRTNQFMLAPTREQHQILFELADACSALYNAVNYRRRQSFFEGEIDWNYKDIYDAFSPVLGAYIAGQVIRKNSEAWRSFLALKRKKTQRGLPPHIRRVSPPGYWKDRSTGERELRIIIRKDGYRITSRHVEIPLGRELRRRYGIRKLRVRWKGRLGWCGEQGRLEIVYDRVDRRWRCYQNVEVSPPHQPRGNRSAFVDVNIRNLLVALIEGVPKPLIFRARHLLSDWLYWGRCIAEHQSKLAQANGRHSSMRLRRLYRRRQHRLKQGINSIVRAFVKFCWLADVSTIYVDDPLHTHDGVHWHKKGNTLLHNFWCYRYLMQRLRLTAEEYGIRVVARRASSERCSLCGGNRGTTGCYRKHRGLFVCKTHNIAINADVNACLNLAGAILPSPSLQRDRDNWLVTQPVAVSSHTGESPNLPALAVENVNPLWCVAELSKSLLVER

SEQ ID NO: 1370 - protein, 426 aa, synthetic construct
  REGION 1..426: note = Synthetic
RRTNTFIVEDNSILRELADNCARLWNELNFERRQAYINYRKFEWYPKHLYRKYASLIGSATAQQIIRKNNEAWRGFLKLKKLEKEGRLPPHIKRVSMPGYWKRRGRRELRVIIRNDCYRIDDKYLYLPKGLKLRYWGKLKWHGKQGRLEIIYDEVDEVWRGFMAVEVEKPPLRGGNKPLYIDLGVVNLATIWHEGMKQPIAFSGRAILSDWWYWTRKIAREQSRLARVNKAKTSRRLRKLFRIRKRRFRHAVNAMIRMIVEYASRNGISKIVVGNLKGIRGNNHGDSKVNSMINNFWSFAWITQRLKEKAEKYGIEVKEVSEYKTSSICPRCGSDRVMRRKRLFKCLNCGLEAHRDVVGVVNIALVHNGGGFNGVVAHPLLLRWNGCRWEPRRAMNTQRMKTLEARISPLKWGECQQQGTYCSQIG

SEQ ID NO: 1371 - protein, 287 aa, synthetic construct
  REGION 1..287: note = Synthetic
LKWYGKPRRLEIAYDDVEEVWRGFISVKVERPPVRGGSKLLHIDLGVVNLATVWARELKQPIAFSGRAILSDWWYWMKRIAKEQSKMARINKTETSRRLRKLYRIRQRRFRHAMNAMVKTIVEDAHELGISKIVLGKLKGIRNNGCNSKANAMIHNFWSFEYIIRRFKEKAEEYGIEIELVSEYETSSLCPICKTKGIRRYRGLFYCPNCDKAINADVVGVLNMAKGKTIIPSPSWRDRDNGLVAQPLLLRWNGIMWGPKMAMSIRPMKTLEARISRLQSWRVSIRG

SEQ ID NO: 1372 - protein, 408 aa, synthetic construct
  REGION 1..408: note = Synthetic
NRTNLFTLAPAAGQNRILQERSVNCAKLWNEINYLHRQQYENYLKLDLNPRVYKKYVPRVGSATAQQIVRKNNEAWHSFPALKRMEKRGELPTTTRRVVPPGYWKRDERYVLRILFRCDSYRIRNGCVDLPRGLSIAFRGQLKWTGKQGRLEVAWDALSKKWRVFQAIEVKPIITPLGSKTCYIDMGVRNLATVWLTEWRQPVAYQSGRLLADWWYWTNRIARHQQRLATVNGRRRSKQLSRLYRARRNRFRHAVATFARQLVRDLYARGVSTIVIGELTGIRSNSDHGRQGNAMVHNYWSHKHVADRLRWTAEEYGMKVRTISEAYTSQTCPRCHSRHSQRVLRGFRCLDCGLEAHRDAVGVLNIAARYGGYAVRPMVWPMLLRWDGCGWNRNNGMPTQAKRIRVEA

SEQ ID NO: 1373 - protein, 279 aa, synthetic construct
  REGION 1..279: note = Synthetic
LPHHLSVTFRGKLKWIGRQGRLEVAWDSLSKKWRVFQAVHVKPIITPLGSKTCYIDMGVRNLATVWLPEWRQPVAYQSGRLLADWWYWTNRIARHQQRLLTVNEHKKSKQLSKLYRIRKRRFRHAVAAFARQFIKDIYSQGASTVVIGELTGIRNNNSHSRQGNAMVHNYWSHKYVTDRLKWTAEEYGMKIRTVSEAYTSQTCPRCGSRHSLHVLRRFHCLDCGLEAHRDAVGVLNIATRYGEYAVRPMAWPMLLRWDGCRWNRNNGMPTQAKRSRVEA

SEQ ID NO: 1374 - protein, 406 aa, synthetic construct
  REGION 1..406: note = Synthetic
QRTNVIRLKPNKKQGIILKELCLLSSCVYNIANYTVRQQFFNGEKISDFFNLQQNVQNSDDYQLLGRSYALPRVQIYSETNSARFKLLKSKKQTKVGLPKYYKNRKTNTTISSYLVIDNSQYSIGKSYVTLPLSRKMRKKYNIFQRSFRIKYNGILKWKGKQQRAQIKFKDNNFYFHQSVKLYDKPIRKSIVKAGLDLGIKKFLAFKMSNNEDCLIGNKRFFRQWEYYGSIISEIQSVLNKQNLKSSSKLKQLYRKRKKWQNNLFNNLVSKMFKIFNRNNVSELVIGDIRNILKSGSNVGKKANRMTHNYWSFDLLCHKIQNKAEEYGIKIFKVPEIDTTYRCPICGNLDYNNVHDRIFYCTDCSYIEHRDIIGSINILSKGMHGPLQSTHQDEIVLLGGGMSNDS

SEQ ID NO: 1375 - protein, 396 aa, synthetic construct
  REGION 1..396: note = Synthetic
QRTNVVELVASKQQKKLLLELMTLSSCVWNMANYNFRQAIFKKEKIKSFYKQQQAIQTKDDYQKLGRSYALPMLQKHSFLVNAFFRLIKSKTQEKVGLPKYLKNRKTNTTIPSILRIDSGQYYFKKDKVHLPLSRKMRKETSLKGIVLEYKGKPRWEGKQGQAEIHYNKTKKKFYLHQSVKIKDPKQRHGNKTLAIDIGIKRGIAGFDNKKAYLYPSQIVKKWKQITKRIKRLQRIAKTRNNRYSTTQINTLYQKRCLMMDDYYKNIVSWAIKDANPDKIIVGDVKDILAKPQKNRKANQMTHNLWSFDLLYKRLANKCEEKGIELAKVPEPYTSQLCPACGSFNKPIDREYECDCGYKQDRDINGAINIYHQNIDGKVYLHPAVENHRLLVRGCK

SEQ ID NO: 1376 - protein, 416 aa, synthetic construct
  REGION 1..416: note = Synthetic
LRTNTLELKPNKQQQWILKEMLVRSSAIRNVRNYHRRQAFFDGNIKNPCYSSQCKKIKNHDLYKELGSAYSQQILKKLDKSWQFFWNSLKSDNINHKVSIPSYFKNYKTNQTLPKLLICRNDCYRIDKHYIHISCSKDLKQKFGIKGLLNIKYNGVRKWKNKQSQMEIKYIPHTKKFYAYQSENVEPTPIKKREENICSIDLGIKRYMSVYIKNSKNINLTYESEHIFQEYISLTKKIAYYSSKAKKENNKYSTKRIQRLYLKRKRKLSNYLNNIIAHLFRKLEQYEVSKIIMGDLNGIRDSMIPNHFRNKKKINQMIQNFWSYDLFLRKIENKCQEHEIKLILINESYTSSVCPICNERVKPNDRRFKCKNCNYEQDRDVVGSINLLKKYYHDHHKTDDSRVENYPLVSKVCIES

SEQ ID NO: 1377 - protein, 469 aa, synthetic construct
  REGION 1..469: note = Synthetic
DYRYRSITLKIVGPEGYRRDLIFLSDRCTAVYNELNYLRRRFFFKGKLDAVAVSRSELTFRRIYREYGPILGTQTVVAIGEKNTEAWRSYFKQIKEVKSNKRRTICQPPRYWKGPLGREPRFVFLASQIRRFEYDPLEHRGVIEILGLGDVVDNLPNVGFKRGRGRGVRLEFVGWFPWHPNRVKEPKRADKIILNGDDGKEFFGRSEIVYSWADNAHYLTLNMKVNKGESWLVSRLTPNGRVRPIPRTGNNCENAAAVDIGRRIFAAVYFSDGKKPVLVRWGDAWSRWSYWRKIKAPKEQRRLNKNGANFSHRLKQYYVKAHRAIMDAIRHLVSKLVQILLSREVTLLVIEDLKGLRQKLHGELAYWAYKRIIREIKRKCEEYGIEVIEASPAYTSVTCPMCRSKCKRNGGLVICSKCGKTMNADIVRAYNLLTRATDDPPEPELEYLTGSNCTTVLPSNHKPPITPNR

SEQ ID NO: 1378 - protein, 448 aa, synthetic construct
  REGION 1..448: note = Synthetic
RCSEKVRLDPTRRTKPELRLLGDRVSRLWNAANYKCRQAFLAKTGVPVGATLEALMKDEPDYRQLPSDIAQEVLKKLSEAWKSYFELRQKWTGGKLKDKPGLPAYRKDRKTGERPFDLIPIKHSRSYSVDPRDAHIVLPRDRRRASGGGRLHVSYRGRVRFPGKMGRAEVTWDKVRRRWYMAWSVTVEDLKPREGGLRAAIDLGVRISVSLSVEGQPQALHFEAREALKDWDWLGREIAKEQAHIAGTRGPAREDRAPSSRAIARLHQLRRLRVEHAMRCMAKRIAEECDHLGVTQVFMGWPKNILRDAKYGSSAWAGRIHAFWSFDKVLGYLAAALGNFGIAAARVGERGSSSTCPTCNSGEVVRNPRWSLRCRSCGERMHSDQAGSRNILRQQVADAGFGEVPGADRDGLEASPRTVTLRWDTHLWRERFVNPGREESLPEFKKAA

SEQ ID NO: 1379 - protein, 277 aa, synthetic construct
  REGION 1..277: note = Synthetic
MKYVGGERYRGAKKRAELLWDKARERWYLKYAVEVADKVIHGSNRGAAIDLGVRIAASLSIEGVEQARHFVAREMLKDWDDWGRRIAQHMQELAGRGRKCSHPLSQLYAMRAARWRHAWRAIAREIATTCRRQCVGTVYIGWPKGIREERVYSKRWGARIHNFWGFDASSRILQAALERQGILVKRVGERGSSSTCPVSSCASKKVTRKPRHILSCRTCDTTIHSDQAGSRNILAFNHPGTSWDAVKTTARPDTLRWNKQRWVDAENRNDRTLLKAA

SEQ ID NO: 1380 - protein, 427 aa, synthetic construct
  REGION 1..427: note = Synthetic
RKTNVVRLLPEKEALWTLHAVGDRVSCLWNAGNYICRQAFIGKEKVPNYSALCALMKDSADYKALPTHIGQEVLKKLSKSWISFFALRRSFAKGEIRHKPGMPKYRKDRKKGSRPWDYIPVKSTAAYCVEGCLIHLAVPADIYSQRIAIPFRGTLRYQGDFKTCELLYDNAKKRWYAHIVVEYQERVVADERPEKHAGGDIGARRAIAVSTQGNPQSVVYSSRQAWKDYKYWSRLIAKEKTRLSKQGYKTSRRLQMLYRIRRLRLRHAMEALCADIVQGLRRSGVTHFTVGYPVNCRDNANFGKGNELVHNFWNFEILLRIIEKHCIRAGIAFKRVDERGTSSHCHICGRKVRRPKTDIVVCPVHGIMHADVNASRNILRKVTPALAGDGEKASPGWVVMRWNLHRWQSHAESANNRVLQEAAHAAA

SEQ ID NO: 1381 - protein, 433 aa, synthetic construct
  REGION 1..433: note = Synthetic
RRTNVVRVLPGKQQRQVLETIGDRCAALWNAVQYRCRQAFFKGEPVPSYAALCSEFKEHPAYRALPAHIGQEVIKKARKAWDSFFACLRLYRKGELERPPRIPRYWKDRRTGKRTFCVIPVKAPTSYALDSRTLSLTLPRDLREKHGGRLVLHTKGVLRFHGTPKTLELKYDRVKKRWYAHQVVEVPEPARKTRPEKYAALDLGARVLAALAVEGLDRQILFSGREVWKDFLYWTKQIAEEQSRLNQAGRKTSRQLRRLYQVRTRRLKHAFVALAAEIARILKQHRVTTLFLEDLTGIREDMDFGPKNLLVHNFWAVRQLRNLIEAACTRAGIRVVPVEPRGTSSRCAVCGSPVKRPARYKVVCERCGCVWHADANAALNILLWGSSKGHGAEATPLKPLALRWDRHRWVSRFESAAGTLYATSGSRMAARAA

SEQ ID NO: 1382 - protein, 314 aa, synthetic construct
  REGION 1..314: note = Synthetic
TRCIPIKHPRSSRIAGGILEIPLPSDLRGPQWTRLRLRIRGVRRWQGKEGRLELVWDPARRTWYAGQSVEVERRVPQRRPREFAAIDRGARAPVALAVEGSEEAWVFPKQGAVEGLPEPVQAHPQAPGPARHEGAALLQKSPEAVRQKTGRLLAVYRALARTVVRILRMAGVTDLLVGDITGIHEDMDFGRLNEVVHNFRSFRELLGTIPDACERARIRVRPKPEHGTSSHCALCGNPVARPTRSRVRCPAGHEFHADVSGALNLPYREPEVRARAGGRPRWRTCRWTGHRWVPTESARGSSNPPGTPHAAVAA

SEQ ID NO: 1383 - protein, 466 aa, synthetic construct
  REGION 1..466: note = Synthetic
KRTFSVRLFPTREQKEILRELQLRCAKLWNKANYILRQHFFKTGQIIPYEELFHLVKNSQEYKSLPSDISQAVLKKLSESWNSFKELKKLQEKGKLPEHIKKVSPPKYYKDRKENKTIPMDVIPILSPRSYSLGDFFFSFTLPKDLKKKYSIKKRLTILATYTIPYKDFKFGRAEIVKKNGKWYVHISVEVEKTQKSLEGKNYASIDLGARNLIVLAIYDKERKLIRVYQFKSKELWKEFKYWDRKIAKYQSKLAKSRHKGKSVKLRKLYERRKKRIMSAIRGMGNKIVELLQRYEVKEVFVGDLTGIRNGKDYGRKVNKLLHNFWIRRQIEQVLKDKLEEAGIGFVPIPEGYTSQTCFNCGSKALRPKRHLVICQKCGKLHSDTNGAISILKLGLKLKDLEWEKIREVHLVWKFRKTNRWVFRYLRVYKKNKDKLLVRGRVNNPPVRVAKSYSPKSSLAPSVRGG

SEQ ID NO: 1384 - protein, 439 aa, synthetic construct
  REGION 1..439: note = Synthetic
KRIVKVKLYPTGEEKQKLRQLQLRCSYLYNRVNYILRQQYFSFGNVKVSNGTLYRLAKDLPEYEALPSDIAQEVLKKLSEDWKSFLNLKKLEKKEKLPPNIKKVSPPKYKKDRKKKQTLPMNIYIKTDRSYRLGNYEFELTVPKDINGKRLKVKAKYSIYYENIRNFGRAEVFCKAGEWWCYVTVNLQQEEKQPLGKRLAGIDFGIRNFLTLAVETDKGIEVFQFKSRELIKDYKRWDRKIATYQSILNRSGTKTSKKLQRLYIKRDKKLKQSINSMLNKVIDICVSRGVEKIYIGDLTGIRKDKDFGKLNVLLHNFWIRNYTLKRLKEKLSEAGIGIKPIPEHYTSSRCFKCGNHIKRPHQHYVVCENCGKLNADLNGAINILKRGKKNLSLEIVSFYQFKWIRGRVNSWIPIVMGEGDKPPCSLFLRLQNPSHFNEG

SEQ ID NO: 1385 - protein, 413 aa, synthetic construct
  REGION 1..413: note = Synthetic
MPYLTIKARLRGAPERFAILRDAMLSVTKVYNGLIFHLRQEYEQQGKACYSASHLNRIARGLPRHKELYSDVVDTTRQEVGWAFGSFFQKHKRDKKARPPGFRKKMCLSPLRYSHPNNGSIKVIHKRGITYLRISLGTTRQDGIRRLVFRLHTRPNVDLSQLKNVQIIYDTHTRDFQARLVVGVDVPDKQQGEASVGVDIGEDWLIAADFCDGAQYLVCGRELKATRRYWQKVRAKVKPPSQDHPVMSRRYRQIARKEARQITHALHIASRRFVDVCADKGVGTIILGDLTGIRQHIAYGTRMNQRLHAWPYAKLRALIEYKAALLGIKVKVVCEKYTSQTCPHCGIRKKSNRKHRGWYSCRCGFEGQADLVGAFNIHRKVSGVPSSGRSARPVVLVFDHHTVHEAASSREAA

SEQ ID NO: 1386 - protein, 293 aa, synthetic construct
  REGION 1..293: note = Synthetic
VEIHWNSGTSKPRKQRKGVNVKQVSFRISHRPEIEYERVRELSIAYDKVSGRIEARLVVEVKTRENDGTGKAAVDLGETVLMACTFDDGNVILYSGRLIKCIRRYWQKVRANLKQNSRSWKQIAHREKKQIEHLLHVATSHFIEECVRHGVKEIVIGNLNGIRENIDYGEQLNQRLHVWPYRKLINMLKYKGELAGILVRDNVDEGSTSITCHACGKIMASNRRHRGLYVCSCGFKAQADVNGALNIYERAYKVSPVKGSSGRVARPAVVSYRLGWHGVAEPKHRDKTLCASA

SEQ ID NO: 1387 - protein, 414 aa, synthetic construct
  REGION 1..414: note = Synthetic
QMMLTLKGKVVASGEATAILLDAMLCATKVYNGLIWHLRDELERTGKSKATRKNLNAVLKTLPRAKGYYSLSAQATRDEVIQAYNSFFALRKAGRTQHQMPGFRRKTEYSPLRYYEGFGFTLEGDQLNLSLGTGRQDGVKSVSVALQMRQDVAYQRIINVLITYDKEFGLCAHLVVEVKARQPLGNRKVAVDLGETQAITAIFEDGASLLYSGRLIKSIRRYWNKVRARVKPPTAENKRKSRRFRQIERKESRQVQHLLHILTADFARRCWLAGVDTIAIGDLTGIRERIDYSDELNQRLHAWPFRKIVDMITYKAGLYGIQVVEVSEAYTSRACHACGEVRKSNRKHRGLYVCACGWHVHADVNGAANIFQNAYKVSPLIERSSGRVARPVVLPIRLGWHTVHETKSKVALAA

SEQ ID NO: 1388 - protein, 411 aa, synthetic construct
  REGION 1..411: note = Synthetic
MQTLTAKAKVVDLSDQDALLLGLLGFVATKLWNVANHHRRSVWDETGKIPDFAQQCRELKANRWYKLLPSQSSQEILSELDDSYRSWFSLRKNADQKANPPGFRKKETLSTVTFKQKAFEMLPGHRIRLRLPKTYARREMVLEYRLPPDTALGKVQQVKLSLDPTSGDWYVHIAHRVPIEYCETGRIMSLDLGIANAVAGLVTDGFSFLVPGGELLAIDRYFQKEKAKCTKSTSNKCTRLNTKWGRQRTHYLHALTKWLVNLAEDHGVSTILVGELNGIRQDKDWGDAGNQKFHAWPFSKITNLLTYKAALAGIRVIQVSEKNTSTICPHCEKRAKTARVQRGLFLHCGQSFNADLVGAYNIVQRYLRETDQVLPDPSGVVGALARPAVNRFVWRKTTPKGREQGTFKQAA

SEQ ID NO: 1389 - protein, 408 aa, synthetic construct
  REGION 1..408: note = Synthetic
YQLLTTKAKIINLSNQDALLLGLAGYAATKMWNVANHERRTVWQETGKIPGFPEQCKALKTNRWYKLLPSQTAQEILAELDDSYRSWYSHRKNGNKLAKPPGFRKKDTLSTLTFKQNAFAMPDIGQIVLKLPRTYARRVVTLEYKLPPETTLGKVQQVKLSYEHKTGSWYLLIYHKVKVNYLPLQNIMALDLGIVNIITGYITNGKSFIFPGGELLALDRYFNKMKAKTNSTKSRKCRFLNRKWSRQRNHFLHVLTKRVIDQAEANNVSHIIVGELKGIRLNKNWGAKQNQELHTWPYRRIIQMLRYKAALRGILVEEVSERNTSTTCPLCSKRVKSARVERGLFVHCGKAFNADVVGAFNILQKYLRDNGLPLLEVVGALARPVVNLFVWRKTTPLGREQGTFKLAA

SEQ ID NO: 1390 - protein, 432 aa, synthetic construct
  REGION 1..432: note = Synthetic
LQTITAVGKVSVTDDSTAILLGLLGFSATKLWNTAVWYSKETWKTTGKIPTYHDLDIVMKQEHPLWYRRLHSQSAQAVLEDLWQSYKSWYALRKKGDKRAKPPGYRRKTALSAVTFKQAAVQWDPRTSTVRLSIPKDIYDKQFLYLKVRMPYGYRFTNDNIQIGRLVYLKGVWYVHLVYKMLLPELKGNREAMGVDLGMVNMVATACTDGSTSLWLGGELAALERYFEKQKSKTTKSRSRKSFAQNQKRSRQRTHLLHSFTKSLVRDAEARGVSTIIVGTLKDIRTGKDWGDSGNQALHKWPFDRIVKMLTYKARLKGILVVDLNESYTSQTCSQCNTINKSSRVHRGLYVCNHCGAKINADVNGAVNILKRYLPEQISVSWSSGCLAQPAVNRFAWRKTRPATSAHKPGTWQTTLPHLRTESVMALSSCRV

SEQ ID NO: 1391 - protein, 407 aa, synthetic construct
  REGION 1..407: note = Synthetic
MYLTTRVKIAEGGEEREALREAGNICTKIWNKANYYCREQWEQTGKIPSYYELQRVFKDDFWCRKLHSHTAQAVLHKLAESYQSWYKLKKTDPKAHPPGFRKKNSISTIAFTNFAVRVEDHRLRLTLTKGKHIWLDYQVQPGVEITQGNIVRVEITNGYSNIVYRVEEPEPKKKGQVMAIDLGIINTATTVKEDGEAKIYSGKGVLSIQRYFNKEIAKLQSIVMNQSGGKKKWSRQLSELSRKRRRQIKHALHALTRSIVEDCVKSNVKEVVIGDLRNIRKGKRWNKKSSQKLHAWGFKQFTELLRYKLALEGIRLVTVNEKSTSKMCSRCGYVDRYNRKKRGWFKCRKCGYEENADINAAINILKKYLHQTGRPVEGSSGVVNAPRVIRWDGNIPSEPDARQFIGG

SEQ ID NO: 1392 - protein, 450 aa, synthetic construct
  REGION 1..450: note = Synthetic
SKGNYTGRKGGAALAWSSKSHPHRLLLTKQFPLGLEMLALFQPVMLAANKIWNSCVWHSRETYKTEGRWPSETELKAKFRAFAAWKELHSQSAQATVEEYFEAVSSYRKHRNNGHGEMNPPGFKPKNCLRTVTWKRQGFAVENNTLILKLSRTREPIILPVPENWDVITLPDGTRVKGAPVEAKVKAVVRRRRVENLVLHVTFDLGVIPVRTEGLVSAYDYNSALVARTVSNGTQDLFVCRELLALMQYRNKITAEFQAKMSRCREGSRRWKKLLAAKLRALRKLDRRIKQMEHALTKHLAELDAAEGVARAVAGDLKDLRRSSRTGMKNKEASQKINQMPYHRMQAGHKYKSIMRRVHLDARTEKGTSVTCGVCGARNPAWRRKRGLWVCGSCKTTMQADLNGSTSFLKRVLLGDCIGRQLPFALKPPRVWRWDRRLNRFVQVSPRAAA

SEQ ID NO: 1393 - protein, 333 aa, synthetic construct
  REGION 1..333: note = Synthetic
VENYFEAVRSYNKHKENGHDEIRPPNYKSKYLWRTIKWKNGNKAFEYKNNAITLKFSRKMESVTIPLPEGANMLMLPDGTKLNGTPIEVKVKAVYRKKEVSHLQLHVTWDYGIVPVSVNVKVSAYDINSAVVARTSTEGNRQLIMCGEILSLVQYRNKVIAEFQSRMSKLKDGSKKMKKLSKAKGRILKKLERRINQLVNSLTKLMGVLDKEENISVSLLGDLTDLRRSAETGDKNKVASHKINQMPYSKIENQHSYKSLMKQIQSKKANERYSSQTCSRCGARNKEYRIERGLWKCEECGETIHADINGNTNILKNYLFGRCDLGWLLRMNR

SEQ ID NO: 1394 - protein, 409 aa, synthetic construct
  REGION 1..409: note = Synthetic
PHGLLVTDIVKVEGDYDILENLACIANGLWNSAIYLIYQRYAKEKKFYFYSDLCMLMKEHVLYRLLPSQSAQGVLQKVDGALRSFIKLKKVDPDAGPPGFHPKNTPWIIPFKSGQFKFNEKDSTIKLTMSLRYRKEKGMDFIVVRTSPLRHKGKVKYLELYQRDGLWFASVVLEMAAVPKIRTDGNLYIDLGIPNLVAVYDGDTTTLYKGGEVSAILRYREKTKAKFQAVLSTHGKRTSKAKRNMSRKLTAQADHAIHAMTKDIVARAKREGKGIVVGDLKHLRKNVKFNDNANQKIHQWQFGRTTTQLDYKGGYSGVPFDTGSEVDTSATCCLCGKKENGRVKRGLYRCKKNHVQFNADALGAVNISKRYRRIPLRQCSEIGVVGSLASPVVVLWDHHRWVPLDEANL

SEQ ID NO: 1395 - protein, 425 aa, synthetic construct
  REGION 1..425: note = Synthetic
PIYECRIGRIDTDITTYWMLARMSWVATKLYNTALWHSRKQWGETGKIPSGYDLQKVVFASNYHPYLPAHTYQHTAHQVGNAYKSWFKLRKTDKTARPPMFRPKEQLSTMMFDAFKVKDNNNTIFLTLSKSLKEEMDYPYKWLCLRLKWNTPFPKDGKITQIEIVPRNGYFELHAKILLPEPDWKTEGQIMAVDLGMRNPIVSRDEQGNLDIFKGGKILSNLRYWNKEKARVQREVMRRTNGKKKYSKSLSKMSKHGSIQVKHSIHSLTNTFADLCNQRDVKEVVIGNLKNIKKEENGKGKKWGDKSSQNWQQFPTRQVVTQLDYKLARYGIRLIEIDEKGTSRGRCSLCGCEDRGKLRRVHRGLFLCENCSTVQNADVNGAGNILVRYLHQTGKLVPVGGSSGLLADPMVWRWNDHQWKNMVVG

SEQ ID NO: 1396 - protein, 404 aa, synthetic construct
  REGION 1..404: note = Synthetic
KFCVKYRLKPTEEQAVALKKLAFYATKLYNTDNWTRREQWTKTGKIPNWYAQKKLLKTNHWYRLLPSQTAQAVIKNLQDNYKSWFKLRKTDPATKPPGFRKKFALSPLTFYQQFTLVGDQLAFVMSRKFRTETGVDKLVFRLDLWRKVDDAPKMCTVLYQDEKWMAHVVYEVQEPPRTGDENVMAVDLGIVNLAATVDLAGRSKLYSGKQALAVQHYFNKEIARVQSLTARQQNKKGSRAISRMHQKKQRQVNQILHSVSKALVEDAKRNRVGTIVVGDLKNIRKDNGEAKDFGRNNQKLHAWGFRKLLTQVRYKAALSGIRVVEVSERNTSKKCSVCGVVRKANRKHRGLYVCSKCGAVLNADVNAAVNLLRKYLHQAKAQGSIGCVTQPLIWRYAVNQEVLL

SEQ ID NO: 1397 - protein, 384 aa, synthetic construct
  REGION 1..384: note = Synthetic
MAFASTKLWNIANWERRQVWEGTGKIPNYYEQEAVLKNNPWHKRLPHHSAQAVLQKLDHSYRSWFKLRKTDQTARPPGFRPKESLSIITFKESAFRVEGDKIRLTIPQKVKEELYYIESFLILPFQSYKSLEGKPKLIEVMYSGEAWFAHIVQEVQAPELLPDTNAMGIDLGIVNMAACVTEEGKAEIIDGGQIASVWRYFNKQIGKIQKRVMGRGKRWSEGLTEISKKRSIQTKHILHAATNRILEYAINENINTIVIGDLKNILKKKNGDSRNFGIANQKLHSWNFNQFTQMLSYKAQRAGISVKKVSERNSSRTCSVCGIVDKKSRMHRGLYRCRHCGTELNADVNGARNILKTYLESVSRPVVAELAQPSVRKWNSQKFC

SEQ ID NO: 1398 - protein, 437 aa, synthetic construct
  REGION 1..437: note = Synthetic
TMTDLYRGIVCKIEIVKGSKVLKTAQYHARHLWNFTRYCAVGYNYRLRKQRGDWYGLGKMPKYPGSSGMWKAMHDTEEYKSINDRVASYVLRQFDGNMRSWFSNLKSNPKARPPSYAKISPPLTFEVGRNAKLLGMNIWRLSALSGSVDERYVFARIYLPPMTNPDRVASINLRDGRCAVSYMRRQKERFGSQTAGIDLGINRIATVAFENGESIMYAGGLLLSKQRYYQKKLANCKPPGWQKGRDLRGLSDNGKRYYQDWLRQKRLILDNLTTSIINECVARDVGTIVLGNIKGIREGKDYGKEMNQKLHAWPYWQIDQMLRNKAELFGIKITTVSEKYTSRTCMLCEHVNTNGARKQRGMLTCKNCGQKIHADVNGAFNILKKYLPADKQLGVVVRLRSLPSTGIPGNRRTSSQIDPTFSAIFDLRNYAVVLNRC

SEQ ID NO: 1399 - protein, 536 aa, synthetic construct
  REGION 1..536: note = Synthetic
PAERVIPPQVAARLAAQQRKLDANLVDMTAVVPVTLSWADHLRAHQACHAAAGLWNRSVDWLHEQWRGQKSPKKDDIRRFVTALPADARPFHAHTAQAIAHDLHDAVVTMRANKKAGRKACAPWRERKYRPLSFTKDYGWRITPEARLGLSLGRGRDRILVPLPEVVSRDGVPVAPKFWGEMRLCWSVTARRWSLHIAYSTPSRALPAPAEDRPTVTVAIDEGIINPMTLAARMPDGTTRVLVVNGRQGRAAKQWRNKQTARLQQKLSRCKEGSRRHRKLMAAKKKLQAKTDRRLHDFDHQVTVRAERFTREVHAAWTEHHQAAAQTGGTAAPVVGVRLVAGDVRGIERNTNKKRRASRSTRQQLSQWSRGRQEQQLAYKTGLTIEHISEAYSSQTCPKCLRRWKPRGRQYICKNPECGFRCHRDAVGSVNIETLAVNEGQFLPLTDLRIEVKYRRPQAGWSPLQRSLHSWHQQALGQASVCRERREGRRSARNRATCRTRPADDAVVPRPRDEVGTIQEAATTLAGAGRTAVHAP

SEQ ID NO: 1400 - protein, 470 aa, synthetic construct
  REGION 1..470: note = Synthetic
RTVIAPVTLTGADHRRAHDACHAAAGLWNQAVDWVHEQWTFREADVSRYAIRAFLTALPAAQRPLHAHTTEEIAYDLKDVIDGSRASRRAGLKVRAPWRKKNYRPLSFTAGYGWRIRGGRLSLSLGRGRPPLTAPVPGVTDPVTGRDVAWQLWGEIRLCWDRDARAWSLRIAVPAAPPFAMDPAKITAIDEGIINPVALAACAPDSTAGHPVIDVTIVNGREARAIKRDRSKAAGKLARKMSRCADGSRRKKHLQRARKKANARAKARLRDFNHQVSRKAADFIQAHGTGTVKAGDVRGIEHKTRVRRRASRSTRQQLSQWDRGVHEALIGWKTGVPVGHVCETHSSKTRPACLTRNRPAGRRYRCRECGFACHRDAVGAINILMRAIYGEYCRIDPGTVIRVTYLRAVGRWSPGQRQAHSSVQRRKARARSKAPNRAAASPPTGGVAGGQAGVSATVSALTADRVVAAA

SEQ ID NO: 1401 - protein, 456 aa, synthetic construct
  REGION 1..456: note = Synthetic
HNHNYRPCDIVGCMRRSTRTQDDETWRVAVIPVRLSGADHRRAHEACHKAALLWNFLLAETRAYWGEHGSDPSDKELRHRLYEKRPDLRDGLHAHTIQGVLDGMNDAVATYRENRRQGNMDAHAPHRAKNYRPLDFTAGYGWRPANDGKHIALSFGRNHKRILVRMPNISDPRTNAPVPVERWGAMRLCWDRNKRQWSLHVSVPTGRPPQGDPNNVAAIDEGIINPMAVAVETDDAYEILVVNGRHARAVKHYRNTRIASLQEKLSRCVKGSKRWRKLDAKRRRIEAKTADALRNADHQTTCKVSDFLQEHDAGRIVAGDVRGIEQNTRKNETRRVRNRKDQRRRLSQWSRGRQESLLAHKTGMTIEHIDESWSSKTCPACQTRNHPNGRGYHCRNCGFTCNRDAVGAINILIRAKNGSYQPMDTNKTVHVKYLRATPIFQPEERREHGVIPGTGA

SEQ ID NO: 1402 - protein, 375 aa, synthetic construct
  REGION 1..375: note = Synthetic
VPVMLNNADFRRVHDACHHAGLIWNELVSFQRAFWEQNHADPGWKAFYAHLDTLDPAIRGMHSQTQQAIVADLEDAVATYRKNKAQRIKSRAPWRQKQYRPLSFTTQGWRVAADGRLFLSMGRTRKPILLPLPAITDPTTGDDVASSLWGEIRLCWDRQARSFSLHIAVPTKRPPKLDPSKTIAIDPGIINPMTLAVQTDTGFAVTVINGRAARAIKHRRNTAVAALTSKMSKATKDSNRWRKLDRARKRANAKAASSLRNIDHQVTRRAANMAITHDTGDIAVGMCAVSNSAPGRRRNAGSGDTSAAGSRNGPAAPRKPIWPRKPTPPCVMWTSTTHPRPVPRASHATGPPAGTTDATSAGSPATVTLWAPSTF

SEQ ID NO: 1403 - protein, 471 aa, synthetic construct
  REGION 1..471: note = Synthetic
VWLNRRAHQQAHDATYACGLRWNELNAWLRAEWDAGRRSGKRDLRSHGDRLGLPGVYSQTRQAIADDLWEAVKSSRSNKRNGRSEMRAPWREKKYRHLAFSTQAWRVRSEKLILPFGKGHPDITIPAPRVFDSVTGEIVQPDRWREISLGWDRQERSWFLSIPYLTLRIPIPQADKDDTDAVVVAVDEGVINSMTLATITLEGDVSALVVNGREIRSIKQGHNKRIATISSLKSRCKPGSKRHKRLARVERRQKAKTARRLRNADHHVAKKVSDWIRDEAIDKTTGEIRPVRLVIGDVAGIEQKTRQQRRASRSQRQQLSQWSRGRQERYLSEKTGLALEYVNEAHTSQTCPACGARKKPSGRVYACRNSVCGLVLHRDVVGAVNIHHRGRSGEDELSSYIRSGTKVVVKYQRALPYRRVVVASNRATTSCGVAEKDATRVMDSPRRRPALACNSKPTTQGRVTTSRKPRP

SEQ ID NO: 1404 - protein, 463 aa, synthetic construct
  REGION 1..463: note = Synthetic
RTAVVPARLQGANLRLAKAAERESARGWNIVVEWGREMLRNKQWPDAYELKKRLLALPAPERPKLHTHATQEICFDYEAACKTAKENRASGRKVRYPHKEKRFRPITFTKGFGWTISRRRGEERLKLSFGKTRIYLAIPVVGAGPSTWGEIKLVWAGRNFDLHIPYEVADHPECARSGRLGAIDPGIIHAMACVAEGEDGKLHTLVISGREARSVKRHRNKKVGQLARAQSRLQTGSKRWRRIQRAKGKVKGEADRRLRDIDHKTSRMAADFFNVHGVETVYLGDVSGIEAKTRQNRRLNRIARQQVSQWSRGRQERYLEEKLHCSLDRVGEAHTSQTCPACGTRRKVAGRTYRCQNPACGFTWHRDGVGALNILSRGKTGTLAAMDVDRLAPITYRQPTRHLPAGRDGVVALNRASAKRRWRLDSTVCTPAAVMSGGSPPPTCRLSSQTAAEGATPCTEAAA

SEQ ID NO: 1405 - protein, 813 aa, synthetic construct
  REGION 1..813: note = Synthetic
AIRALKLKFTPSKALKKQLVLMSWAARDLTNILVAHARYIREHKGLACEVVPAQGDSCTLQTWDSESKKWIDAPREGNGVQHAIVPCMVPITQKPKKGELNKAKPLIKPHGETAEQRWEVGLGWEILQALYSGKGCLWPRTNTDRIISKGKRKGLTEVVEVTTQQKPKAEYSLSFEYDEKPHTVTLSAKTVGVITRNFDGNFKSFFSNLRRGDPNAKPPYKERNYVPIVFNKDEIRWEGEGLRLGSVSQNKRHQGITIAFPALKKLKGQQFQDAKVTRSLNGEYWLHLTHENNVEKNPELTGIGAIDFGQKRAIVIANQKGETATISGNNICAVKRVRDRRLREIGRLRSRTLRGQARQYLSKNEQDKALEKNRIKPGSGEKYVRSLVAQRRRDGKDGQGRDLEAIGQKQPGTPFRKRSRRQFKILEASRKLSARSRRALDYANHCVTRAAVDWAVENKIGTIYVGELDNIPKGRKKGNRRMKQVKRNSLWEWPTQTKYLADKLVEAGGIEVKKASERFTSQKCPQCGTLNKPSGRRYHCRPNKGGCGWKGDRDQVGAVNFLNTCLERDIGEPGNLVPGRNYILRISPAARKRKNPRTAPAGRKIRSGLPGCVGTPIGRHASGRSSPASSFEPAEETAKGHRASDRNDEDGSDLHAPKTVRTPRCESGIGIYSKSLGLMQVSAGSGDCEKSSPATSGIGDTSSQPSTLKTGAIKADSGITQCADVEVFSSNIAEEQPQTSSHKGKRKPITSQKIRAKSKTLTPSEVCNNCEPPTRKKAESKIRARTKSAQSESAIQLSLDLWGTAPEIDSWNS

SEQ ID NO: 1406 - protein, 618 aa, synthetic construct
  REGION 1..618: note = Synthetic
QHYQTRTLKIEFHPKPQQRQLLYGMMRSSAMIYNLLIDHLAYKQSAYKQAREEYPDQPAWEVDPYVDIRRKGWADELIITLITQQSSIYPRQLVNKPAKQGKDKGKERLVVATEKNAKPDYGIPAQSKVVLTQDFEANIASYFTHRKNGDTNAQLPRRYKGLHTLFFTNQLVKRSGDRLILGAKPYVLKLRVPELLNISIDGDVKITRSRSGRFCLHITRKLPVEPNPELIEVAAVDFGQKRAMVLALKDGTTATISGKNICALKRERDGRYRGINRKRSRVLKGQIRQYLSPDEKATYRELQERDNERQRQGLKRRGSDIKYAFRIIRQRRKDLGLKKRSRREMRLLRSQHKAADYYRVRLTYANHCVTRAAVNWCVENKVGKVYVGDLKTLPKTRKKGKRRIKQVGRNNLWEMPTQVKYLDEKLLLAGGEGTETASEARSSQVCPNCGRRHKPRNRVYYCNPRKGGCGWLGDRDGVGGCNFLSSVLYGACGAIKPAQNRTLRLAPAIRQGLRMPTPDGSAVCEPAEDSAKGYKSSDLQESAVVADSVAPRTDRNPATSGKTQARGGMGVLATSDPSELVTPVVSSQLAKTGVDRPKRRSLKRLPEDHIQLELWESE

SEQ ID NO: 1407 - protein, 631 aa, synthetic construct
  REGION 1..631: note = Synthetic
IYRTAKISLKVSRRQQKQLRRLMSAQRWCYNVVIAALRAANSPIYPIVPGVGPVRACSLKSAPKRRKQYLADGKPAEGYIVREWRDWQQFKPWDALKGHCDLYPYHDRDEGGSKYGVSAKTASGVTQTIRGFIQGYWTKRKRGDFAAQMPNQFRSAQFESGWIWEVDKQELDWDGDRLVLGTRNQIGGVVSLPIPKRYVGCSINKASITRDGAGDFWLHLSYAAAGEHGFAPDPDLTRSAGIDMGQIRAMVLTLDSGKSVSLSGRQICGLKRERDRRFRGIQRARARVFRAQVRQYLTDEQKATMAAMEAKSPGQGTKYARRMVSAARKELGLKKRSRRDHHLWQTQKRVATQVNRNLKYANHSITRRAVDWLRGNKVGKVYLGDIGSIPKGRKKGSKRLKQVKRNAQWEYGNQEKMMTEKLEEYGATLHKAHEHFTSQTCPNCGARHKPRGRLYRCRVCGWQGDRDAVGSANILARSIDPAWPDSGRIVPHTLKPLAISPAMKKAGRLHVGAARPQPLGGPPTSREVGCRPPECVDRSPRITREPEATAEGLVAESTRKPRPAGKTAVRADKKVRASRESLAPSAIPASEGLHDDLANTQKQDTRSRFAQQPPETPVQLNLWDLADATEV

SEQ ID NO: 1408 - protein, 412 aa, synthetic construct
  REGION 1..412: note = Synthetic
VEIHWLPHTPSEWRTFTTSRKEAARLWSDLVARHHRLRRRRLKWPSKGRWERWARGKYPGLSAQSAQQLLGEFCAAVHSTRQLRKKGHDDARYPWRRPRFHDVVYTNQDARVRDGDLILPHGTSGRLHIPLPRRALPGRLMEARLQMGRLMLVCEVAETPRPQQTVIGVDLGVNTLIAATDGTKALLISGRGAKALVQARNKHLSSLQEAQSHKEQGSRQWQRLQRRKARMLAQSRRRLHDMTHKATRKVVEAFPNATCFVGKPFNDAAQKMGRRQAQQVSSACNAKLIAQLDSKSCGAIQVDEHYTSQTGPVCGERNKGRRIYRCRRCGLTAPRDVIGSRHILCLGQHGRFVPGCRVPNTLHFVHPLKYPGLSPGSTGGHPGNSLGLSQEAPAKLPCSELESVTCITVEVR

SEQ ID NO: 1409 - protein, 433 aa, synthetic construct
  REGION 1..433: note = Synthetic
NIRVVKINIGSPTPQQTEFRKESARLWNRLVKLHKYNRNRHWKWLGKFDLSSHFKGRFDLHSQSIQALCEKLSANVDTTRTNRKNGDHKARYPWRCKKTFQVCIWKQAAIHIKGNRISLSNGRGRKPLRFKLPRTMPMGKIVQAELGFRELRLTISNEIDKPSSAGLNTVAADVGIIHTAVMTDGVKSLGIVGRGMRSLTQGKNRKLAFYTQALSKCKKGSRKSRKLRIAKAKMLNRYENRTHNVLHHVANQMLDFCVSREAGTLIVGDIANIAKNKKKKQSKRSNQENSQTPIGRLYDYLRYKGQLRGVEIVKISEAYTSQTCPLCGHRHKPSGRIYKCTNKTCDFVAIRDNVGAANILNKHYNGKIVAGTLLPPSNVKYLRPVKLKQSVVDLLNRGKLLSTTHTKVTVSEEAGSKIRCDYDTGFDLETHTL

SEQ ID NO: 1410 - protein, 297 aa, synthetic construct
  REGION 1..297: note = Synthetic
VKLPASLPSGKIVAVELGFRELRLTLSQTVAEPVSAGMNVVAADMGIIHLAVMTDGIQSSGVVGRGLRSLVQGKNRRLAIYQTALSKTQKGSRQNRKLRVAKARMLQRYRNQVHNLLHHAANQMLDFCQAREAGTLVVGDITDMPRNKRKQKKGSRRLNQGNSGNPLGQLYGYLAYKGKRRGIELVKQNEAYTSQTCPACGHRHKPAGRVYHCRQCGYVGIRDNVGACNQLNKYQNDGRIIAGNCTPPELVKYRRPVTLRRGVDRLTGGMLLDTTLTADAGSSGPGSHKPLCLRSVA

SEQ ID NO: 1411 - protein, 412 aa, synthetic construct
  REGION 1..412: note = Synthetic
TYTAYKIKLKKFTEVETEARLEAAKLWNRVVKLHKWFRVRKLPWPTESVFKKHFKDRFNLHSQTIQAIIEKFFSNIETTRVNRKRGDKEARYPYKFKKYFIVPWKSSAIRIKDKYITLSMGRGKKPLKFKLPFEVSGKIVEVQLGFFELILIVKQSLPEITQQPTGVASVDLGIIHTAMITDGYTTLGIVGRELRAIIQKHNKKKSIINKLLSKCKKGSRRWKKLKRALKDYSRKRENSQKNFLHQASNKIKKYCKENNIGTLVVGDVTEINRGKKGKFSKRLNQENGNNPLGKLLQYLEYKLKPPGCKVVKINEAYTTQTCPTCGEKHKPSGRIYNCKSCGKVFVRDEVGAMNILNKYLNGKILPGKLLPTGNVKYLRPVKIFTERSRPTDIRQSTNSRKSTNSRKVAYQA

SEQ ID NO: 1412 - protein, 462 aa, synthetic construct
  REGION 1..462: note = Synthetic
ETTVFTYRVSLSPTEWERASDTRRAAGDLWTRLVKIHRFCRRRHWPWPTEPQLKAHFKRRFPLHSQTVQAIIEKFCATIDGVRTKRKHGDKQARYPWRFRRYFNPIFKGQALKIQGQHLLLPLGRGREPIRVHLPLAMPSGTIAQAELGYDEIYLTVTRTIPDPVPVPSSKAGGLDMGVIHLGVVSDGEEALAISGRGLRSVKQGHAKAQAKLRKKRSRTKPGSRRRKRLNRAQHRASQKVDRITHNALHHTANQIVAFCLATGITVLYAGDLGTLNHKKRHRRSRRTNQEVGALEFGRLDLYLEYKLRRYGIQLIKISEADTSQTCPRCGHLNKMAGRTYRCRACDYRAHRDGVGAVNILNKGMYGAIRPGEFLVPPRITYRRPVPLKRALRRSPAEPRHVAGGISGGESGGSLRGSLDPRRSHSGSPRISALRAGRFKSRCLARSSQGNGPRRFPDARTR

SEQ ID NO: 1413 - protein, 397 aa, synthetic construct
  REGION 1..397: note = Synthetic
ETTVFTYRIALSQTEWTKASEARRAAGDLWTRLVKIHRFCRRRHWRWPTAAQLKTHFKRRLPLHSQTVQAIIEKFCATIDGVRTKRQNGDKKARYPWRFRRYFNPIFKGQALKRDGFYLLLPLGRRRPAIRVHLPQNLPMGRLVQAELGFGEIHLTITRERDEPGVPASGNAGGLDIGSIWLGMVTDGHEALAIAGRGLRSVKQGRAKALARLQKKRSRTQPGSRRRKRLHRARHRLSQKVNQISRNALHHATNQIVEFCVTHQLAVLYTGDLGTLNHKTRRRRSRRTNQTVGVLEFGRLEQYLQYKLRRYNIQLIRISEAYTSQTCPCCGHLNKVGGRTYRCRACGYRAHRDGVGAVNILNKGIHGEIRPGTMLVPQRITYRRPVPFHGTLRRRCG

SEQ ID NO: 1414 - protein, 312 aa, synthetic construct
  REGION 1..312: note = Synthetic
MFGRMKAAQMEAAQVCSGRPSIVLPLQLPQNSGACTLVWNNGFELHACVEIPEAEQVPGEVRGTVDLGEIHLAAVSTNTGKALVVSGRGIRSLKRQRNQRFGKVAKKQSRCQKGSRRWHKLQRAKNRLLARSERRIRDQRHKATRQVINFCVEQEVGFLFIGNPQGVREKDSGRHHNQRMSLWEYGKDIDYLTQKSTQARIMSFTGSERGTSSQCPVCGRKKKPKGRAWNCKNCAFTGHRDVVGAVNMHQIAYGEQVIFPRSITYLRPGSSRRSSRADTPLVARNAGGLLSGLVSRSTTSHREDPLGDRLPC

SEQ ID NO: 1415 - protein, 402 aa, synthetic construct
  REGION 1..402: note = Synthetic
TVRIYRLKDLDRRTRAQMLAAQMEAARVWMYCLERHQQARSAHVPWPSRDDLQRETRGGKFALHSQSIQMVCHQFLANVETIKQLRQSNPRHRYPYHPKKYMTVEWPAQAVSRQGKRLILPMGRGRKSLSLHLGELPEQIGAVSLVWNGGYELHLVVAAPSVASPLASCDASPDKLLRATADLGEIHQVALTTTSGKGLIVTGRGIRSLKRQHNQTLGQLARLQARCQKGSKRWRRLQYTLARASGKHTRRVRDLRHKGTHRAVDFCYTEGVQTLYVGDPHGVRNENKGRHHNQRMAQWEYGKDKDYLQQKCAQVGIVCFSGSERGTSSHCPRCDWRKKPKGRNWICRRCGFVGHRDIVGSMNMHPLAFGSRISYPSSLTYRRPGPLRDRRQDKELSPSGTS

SEQ ID NO: 1416 - protein, 453 aa, synthetic construct
  REGION 1..453: note = Synthetic
VETLSIVPLKGLSAVLQATLKKAQQEAARVWNDLVTIHRQAREIGQQWPDRSELQRLTKGRYALHSQTVQMVCHQLLANVDATRERRRQEPKSRAWLKYPHKEKRFFPLYWPGQAVHHDAKGRRLVLPMGRGRKSLVFRVDLDFEPQGVKLVWKDGYQLHVVRPGQETKPAAPGTVKACVDLGEIHQAAVVTDTGKALVVSGRGLRSQKRLLSKQLGQLSRARARCKKGSRRDRKLAQARRKRSALSARRVRDLRHKGTRQVIDFCREQGVGTLFVGDPRGVREKDCGRHHNQRVSRWEVGKDLSYLGHKAPLAGMACFTGEERGTSSRCPPCGRRHKPKGRLWRCPACEFVGHRDLVGATNMHALAFQQEVTFPVSVTYRRPGPERAACGVNNRKPGHPPERRSSLDTGQPKAVVVSVMPPAWGATGLAGAPKGAAPAGSVETKKLIPFIEL

SEQ ID NO: 1417 - protein, 468 aa, synthetic construct
  REGION 1..468: note = Synthetic
TATTVRIFPLRGLTTGQRSLLRAGQWEAGAVYTACMQAHRIARQMRSPWPAYSDLHHLTKGRHPDLCAQSVQATCRAFDGTINSTRANRTAGNTRMRYPWKERRYQPIRWPAQALQRKRNGTRFPLGGRGKERRYVDLPIHLPRHAGACQIIWTHGQYELHVCVAYEVATSSESETSSVAQGRACIDLGEIHQAALVTDTGKGVIVSGRGIRTIKQGRNRAIADLQKKQARCTKYSRQWKKYQRARDRINGKTERRVRDLRHKGTRLIIEAAKKEGVREIYIGNPHGVRRHQTGHHHNQRMSQWEYGSDIRYVTEKGGRAGIAVRTGPERGTSSTCPNPACRHKQKVRGRDWRCRLCGGSWHRDLVGATNMFALASEDAAVVPVPERRNTTYRRPGPVALGPRARIGNARRSSQGRGLRGTPFPAELITSAASHPPGPGSAQAPPGAGPGGQALGLLDGHGSPRAALA

SEQ ID NO: 1418 - protein, 530 aa, synthetic construct
  REGION 1..530: note = Synthetic
TTTTAVRIVPLHGLAPEQRALLRAGQREAGVVYTVCMQAHKIACHTRGSWPSSVDLHRLTKGRHPDLCAQSVQVTCKADGTIKSAVANRKAGNTRMRYPWKERYFQPIRWPVQALQRKRDGTRFPLGGIGKNRRYVDLPIHLPHNAGACQIIWNHGQYELHVCVTHEGAVEASGCGRGCVDLGEIHAAALVTDTGTGLIVSGRGIRTIKQGRNRAIGELQKKQARCTRHSRQWTKYQRARDRINGRTERQVRDLRHKGARLVIEQAEKGGVGELYVGNPDGVRRHKTGRRHNQRMAQWEYGTDIGYLKEKGAGVGMTVRTGPERGTSSTCPNPTCRHKQNVRGRRWVCRQCGGSWHRDLVGATNMFALAFGDTATVLVPERQNITYRRPGPVGLRQRGRAGNARRSSPDRGLRGTPIPTELITSAVGHPPIPGSAKATCGMGPEEHTLGVLDGHGSAPGQSHHGSFTDRSSASPLPTAPRFGNAHASAPDTERPSEKGPSCDCPGFSPRGLDVRRSSEGRSFGCAEAVAL

SEQ ID NO: 1419 - protein, 392 aa, synthetic construct
  REGION 1..392: note = Synthetic
RTCIVKLSHLSKNVFERIRFGQIESAKVWNYCTEQLKLCFEKKREWVKKYDLQFETKGKYALHSQSVQQTCRTFVGCVEQTRKNKKIDKRRRYPWKEKKFMPILWPAQAMSISGNKVILPMGRGRKNLVFDKPDWLKEKAPSKIIWNSGYEWHITIEKPNKCKSDIVQEKPAAIDLGQIHLGAVVTETGESVIVSGREIRSLKRQQNMVIAKMQKRISKCRKASKLFKKLVRSKKRFLTSMRRRIRDVRHKATRQIIEFCKENNVTKISIGDPSGVQKKKCGKKHNQRMSQWEFGKDIQYITEKAKEYDIDVSKCSERGSSSTCPKCQHRQKVSGRNWECKSCGYKEHRDIVGAINILRNNIGFTVESLSTTYLQPLKNGSSRCSDTSQLAA

SEQ ID NO: 1420 - protein, 403 aa, synthetic construct
  REGION 1..403: note = Synthetic
RGRVLNFSASKSTIKKLYELNRISAEVWNHCLDLVEHAQASEHIVTKNFLQSHTKGQYPLHSACVQTVCIRFAESRKACYEARQMGHNNKYPTYRKTSFPTRWNETGFSLLNTGPRAEEHGDNYKGVLKLSTNIAKSFLYLKVKGISHGDMIYVDVIERYGKLMLSIIERFPKKQTPYSSNQNIVGIDMGEIHSFSCYDSNHNACIVTGRQLRSLNRLRNKQLGEIQNLQSASTKGSNRWEELQKAKMKILERNSNQQKDLIHKITRNTIDWCIQHGITKIIIGDIVDIARNTKNEKKLNRKNRQKISNWATRKLLHNLAYKAKSEGIMIEVIDESYTTKTCPSCGNHKKPKGRIYKCSCGYEFHRDLHGARNILLKGTRGKIEIYPSDNVPQNPVTFEYINS

SEQ ID NO: 1421 - protein, 263 aa, synthetic construct
  REGION 1..263: note = Synthetic
RGRKPIVLYATNLPKGDIKEIELCYDRRLYLSISFDDGIEPLTPTGTQDAGVDMGEIHSFACITENGQSIVVSGRKLRSIHRFRNQKLKELQRLMSKCKKGSRQWKKYNRAKQYILSKSERQLQEASHKNTKALIDWCVEQSVHMLYVGDARAVGKNTKKKKRLNKQNRQKLSNWNIGQLLTYLQYKAEAKGIAVKLVDEAYTTQTCPVCQRKKKPQGRNYHCHCGYKQHRDLHSAGNILTKSKHKKMLPVESSGQPMYLRVA

SEQ ID NO: 1422 - protein, 417 aa, synthetic construct
  REGION 1..417: note = Synthetic
KVKKINFRTNKSDLQRLFDCNRISAKVYNDCLQISKNYSKQTGKWITKTELQKATKRKYPLHSQSIQAVCHKYLDARDAARSARAKGYNNRYPWREKNYFSTKWTKDGFRISEDKKRITLSLGIKDRKRQKSIVVRVKNLPQGKIKEIELVYNKKLMLAVCFEDGKKILANNSTQVAAIDMGEIHSIASVSETGKSLIITARELRSIKRLRNKKYREIYKKLARRKKGSRRWKKLKRAMHSIAGKMSAQQNDILHKTSHNFVKWAKENNIKTVVVGDVEGVQRNTSGRKKANPKKKRRSRKINQKLSQWSFGLLLSYLTYKLAANPIELVKENEAWTTQTCPVCNRKKKSRGRVYSCYCGYREHRDLHGARNILSLYKYKVIKNLDIKIDEIKYLRPAASGKSSRKLCSEPVRRVRL

SEQ ID NO: 1423 - protein, 390 aa, synthetic construct
  REGION 1..390: note = Synthetic
RGQKVAFRASKADLERLRACNRESARVWNECLLLAKEHFLQHGRWISKSELQKQTKGRFHLHSQSIQAVCHQYLFARQSARAAIQKGHRHVRYPYKQKTFFNTKWAKDGFTIHENGKITLSMGIHGGKREKPIIVYVSQLPQGTIKEIECCYDHGWYLAITYDDGQEAKAYQPGHAVGVDLGEIHTIGAFCENGQALLITGRKVRSLHRLRNKKLAEIQRRQSKCQKGSRQWKKYERAKKCILSKSERQLRDALHKTTKQFVDWCRTQSVSDVYIGNVEGVERNTRKKKRASRKQAQKLSNWSFGKTKKYLAYKLAQHGIRLKEIDESYTSQTCPVCRKRKKVSGRIFACSCGYEEHRDIHGARNILSKALHQEILPWPAPTKLTYLRIA

SEQ ID NO: 1424 - protein, 390 aa, synthetic construct
  REGION 1..390: note = Synthetic
RTAKVAFTASRSTIDALFALNRFSAEVWNMCLAEAKVYHQQTGQWIGKTELQKRLKRRFPMHSQSIQAVCHKYLWARDSAHQARKEGYTNVRYPYKQKKYFNTKWAADGFTIHPNGRISLSRGIWEGKRQAPLVVRVTQLPAGTVKEIELVYDRGLHLCLTYDDGKKAPNPPGSHTCAIDPGEIHTLAAVATTGDSLIVTGRKIRSIHRLRNKKLAELQRKMSKCQKYSRQWKRYNRAKQYLLSKSKRQLQDALHKTTKQFVEWVVAQQVNEVYLGDVEGVQRKKKKKRSRCHNQRMSQWQFGKVKKYLTYKLKAEGIMLHKREERYTSQTCPVCGAKKNVRGRMYRCSCGYTQHRDIHGAANLLSKVLYENQIQSLPFEIQKPTYLRIA

SEQ ID NO: 1425 - protein, 416 aa, synthetic construct
  REGION 1..416: note = Synthetic
KVVKSSFSASKEDIDKLFACNRIAAMIWNASLEISKSYALANGGKWISKSGLYKALKNLYPLHSQSVQMVADKYLDARDAAHAAILKGYKNKYPWRRKKNFNTQWKDKAFSFDFEKNVLSLSLGIWDGKRQQGICLKLPKNIMAKINEIMSLNKDAISQIELCYDNGLMLCIIYDDGKQSPENIGFPETVGVDLGEIHSIAACATNGNSIIITGRKLRSINRLRNKTLASISKAQAKCTKGSRRWKKLQRKKRYILSKSKHQVAYKTHEITKNFVDWCLENKVGKVFCGNPEGVQRNTSGRKKKNRTKNKKKIRNRKTSQKLSNWNFGKIKDCLKYKLANVGIEFEGISEAYSSQTCPICGQRHKTNSRNYKCSCGYHAHRDVHGAHNILSLGLNGHFDKVCDFEKQKTKYLRLAA

SEQ ID NO: 1426 - protein, 396 aa, synthetic construct
  REGION 1..396: note = Synthetic
RCLKTDFKTSCEELDRLFACNRISALIWNKCLDIAREYRLSNGGAWISNSELQKELKNLYPLHSQSVQAVSDRYCDARKATKEARDKGLNTSYPWKYKHAYPTRWKQGIKIQDRQIILPLGTWNRHKLGYIQVEIPKSTVDFLKNKKIKIIDLIWDNRLRLAICFDDGKKAIKSKGDTYAGIDLGEIHSISAASEEGHAVIVTGRKLRSINRFRNKKLAEISKKQSRCVKYSRQWKKLQRAKRYMLRKSDAQVRDCTHKISKAFVDWAVDHKIKHVYVGNVEGVQRNTRRGPKRKRRSRRTSQKLSNWNFGKLLQYLDYKLELKGIELEKISEAYSTQTCPVCGQRHKPSGRNYRCSCGYTAHRDIHGAMNILSLGLYNDIRFITDIKKTKYLRSA

SEQ ID NO: 1427 - protein, 432 aa, synthetic construct
  REGION 1..432: note = Synthetic
RCLHSSFHTSKDDLNRLFACNRISALVWNKVLDLSKFYRIITNGKWITESDLKLVLKNIYPIYSESVQAVIEKYIQNREDTLLANKKGFKNKYPWKYKYNFPTTWKVHGFKIKDNILELSLAEFNRKRQSKIKIILPKHTVKELKSKQIQQIELIYKHQLLLSFMYKIKDNNKKINNNNIVGIDFEQSSKQQVAEVDSRTSSIQPMTGVDLGEIHSITTYTNTNKNCIITGRYLRSLRRLQDKSLGKLNHMLSRCVKNSKRYKRLKRAKRRMLMKTNNQIKDCNHKITNELVKFVKQNNISKVIIGDIKGIEKNTRKKNFGNKHNGRLSKWNYGEHIRQIKYKLDSIGVDVELINEAYTSQTCPCCGKRNKCKTRNYRCTCGYKCHRDIHGARNILNKYIYKKIYTEGLEIEEVKYITYLRPLKNKRANKVS

SEQ ID NO: 1428 - protein, 390 aa, synthetic construct
  REGION 1..390: note = Synthetic
KTMIIPVKCSSKDYQYLMQCSRWAGDCWNAIVDADKEFHNQNGRYMKKGELQSFVKNKTPLHAVGNQGVFIKYYTARDAMYKSMTSDHTNSKKVELPYKKKKYFVVCWNVFSFVVDYKNKILKLAKKVDENGRPQKQVRCWFKTMPKHIVEIELIYRNGLCFAVKYKEPKANTDIKEENVAAIDFGEIHSISSIDNNGDAVIITGRKIRSIKRLQNKEQAKLRSKRDKLTKGSRQYKKYSRAIYKLKLKTDRQILDCVHKISKLYLDYCIENNISKVYYGDLDSCTRGHHGKFNGYTNQKLRDWCYGLLTLQLENKLSRYGIELVKVSEAFSSQTCPHCGERHKPSGRNYICQCGYEQHRDLVGAMNILNFNGKDIHIERYKNLKYLRIA

SEQ ID NO: 1429 - protein, 237 aa, synthetic construct
  REGION 1..237: note = Synthetic
LKLALNYRDDTKYLQIQSNNIAAIDLGEIHSITSIDSNGNSLIITGRQLRSYQRFRNKELGKLQQRLSKCKKDSNNYKKYRKAIRKLMSKSNAKINNDMHKTSKLYLDYVILNNIKIVIIGDLTNFNINLGQRKSKKGQQQKLVQWQHGRLIHKLKEKLGRYGVNIEEISEAYTSQTCPNCGNKYKPTSRNYICNVCGFTMHRDLVGAYNILSKYINNGEIKKLDIDVKPIKYLRIS

SEQ ID NO: 1430 - protein, 395 aa, synthetic construct
  REGION 1..395: note = Synthetic
KTIKLRINCNEYDLKRLEICNKESAHIWNLCIKENKMNFEKNKELLSKGDLQSFVKKIDVSTICAFNKTFVSRRVFEAYKAISKARKSGRKDLYYPYKDKKFFPTEWDSYRMHFNYADNIIYLATARYIGNDGKPHNGKQIVLKFKTPIPHNIKTLKLVYEHGHYYACISYLIEVKEKKPFFSNKASIDLGEIHAITSVDNNRNQLIITGRKIRSIKQFRNKRQAELRSKMDRCKKGSRQYNKYRIAYAKIKSKCRKQLDYHIHKLTRMYTNWAIEKGISVVYCGDVTGIEYGTNAKGNSFTRQKINQWEYGKIMRLLEYKLRLEGIQFEKVDESYSSQICPCCGFKNKPKNRNYRCDNCEEEFHRDIVGAWNILSNNCKLDFTPSNYTKYLRIA

SEQ ID NO: 1431 - protein, 272 aa, synthetic construct
  REGION 1..272: note = Synthetic
QNRVELVYKDGKYSLHCAITGLIEKPEKPGDKLAAIDLGEIHAMAITDSSEALIVTGRALRSIKQYRAKRLASINQAMSRCKKHSRKWKKLLMAKRKLLAKTRRQILDLTHKITRKVTGWCIEHKIGRVAIGNLDGVQRNTSRKKAALKKQKSRKVNQKLSTWEFGKQTQLLEYKLSRVGIQLKKEDESYTSQTCPACGHRHKPKGRVFKCRCGYIEHRDIVGSLNFWRVNKYGEMKPQPTGKIIVKYLRPFVLRQKKVVVPAEPQALPKAG

SEQ ID NO: 1432 - protein, 409 aa, synthetic construct
  REGION 1..409: note = Synthetic
KRGVTGAEGDVLVEKIPLRLRPEEEALARDIQRESARVWNTVMTIHRLFWFKYGIWIDEAMMKDFVKGRFEVHSQDVQAIVETYYECWERTKKLHEEGHTEWRYPWRLKRFFTSTWKVTGITVEGGYLRLSNGWKRPPLRIKLPSRLKGLEIKQVQLVWHRNGYWLHVAVVKPALERVQGDTVAAADPGEVHALTLTDGKEALVISGRHLRSLHRLRNKTLRKFQKALSRCKKGSNRWRKLLEAKYRFLNWVEAQILHVEHAITKLAVEWCVQRGVKKVYYGDPQGVREQDCGRYHNQRMGQWSFGRLRDLLEYKLKRHSITLEKIGEGGTSGTCPKCGHYTRQSGRIFRCGNCGFSGVHRDVVGASGILDVAVNGHFTKDRDLPGKVVYLRPRVLAPVGQKHRGPAAA

SEQ ID NO: 1433 - protein, 268 aa, synthetic construct
  REGION 1..268: note = Synthetic
LEIKQVQLVWHRNEYWLHIAVDKPALEKVRGEAVAVVDPGEVHALTLTDGREALVISGRHLRSLRRLRNKTLKKFQKAISRTKKGSNRRKKLLAAKYRFLNWIGAQISHTEHAVTKMAVNWSLQRRVKKVFIGDPQGVREQDCGRHHIQRMSQWSFGRLRDLLEYKLQRHGINLEKMEEQGTSGTCPICGKYTKQTGRVYRCGDRDCGFGGVHRDVIGATGILDLAVNGRFTLGRKLPETVSYARPAVITPMPGHKKKKVAKRRIYVE

SEQ ID NO: 1434 - protein, 405 aa, synthetic construct
  REGION 1..405: note = Synthetic
EKSNLLVEKFPVDLGIFEPLARELQREAARVWNTVCSVHRTLYIRNHVWLNEAGMDDFVKGKFDLLHSQSVQAVVSTYYEAWERTRELREKGHTDWRYPYRKKYFFTVTWKRSAIKHRGTYLRLSNKRGVKSLELELPEHLKGAVIHQVQLVWHRNGYWLHVTVEKPALPEVQGDVYAAADPGEVHALALTDGEEALVISGRLLRSLARLRNKELRKFQRAISRTKKGSRRRKKLLAAKYKFLNWIERQMEHILHAISAIVVRWCEKRKVKKLFYGDPSGVREKDCGRKYNQRMSQWPFGWLRKLVEYKLKLRGIAVEKKEEHGTSGTCPKCAGYTKQSGRVYKCGNKDCGFTGVHRDVVGASGILDVNLNGEFTKDRKLPGEVIYVRPVLRKVKQRRKKHKTAA

SEQ ID NO: 1435 - protein, 404 aa, synthetic construct
  REGION 1..404: note = Synthetic
TGNLVMTEKILLRLDKDQMRIPGDVRREAARCWNAIVNLHRTIYNRYGIWLSGGQLKEFFKGHFRLHSQSVQALVELYEETCRRTKDLRKDGETSWRYPWRKKYYFTVTWKKTAISFKDNRICLSNGRGREPLEFKLPARIDPAAIRQAQLVWKGACYWLHLSIEKPLPEQVTGCKAAGADPGEVHSLALTDGNECLVISGRLLRSWWRLQNKELGKYQRKLSRLKKGSRRWRRLTRKKRKFLEQMRRRKEHLLHTVTSQATGWCFERGVKTLYVGNPLDVTKKDHGYRHNQRMHQWTFGQMFNLLKYKLPARGIEMVLVGEENTSSTCPSCGTKGTLRGRVFHCPNCSFSCHRDVVGSLNIRSVGIHGEIRAGQEAVLRTTYLRPAVHTTQAVDAFGPGHRAA

SEQ ID NO: 1436 - protein, 409 aa, synthetic construct
  REGION 1..409: note = Synthetic
SKGDIVIQKFPLRLTGEERRLVDTLRKEAANLWNDCLDLHWWLYDVYKVWTSASEKKQWYNATTHKLHSQTIQSIIELHEETCKRTRELRAKGEKQWRYPWKYKKFFSVKYKKTAIKLTGKKLRFSNGKQQSPLVIPQPKHIDFHTIKSAEIVWHKDQYWMHIAVEVPKQKQVQGKKDAGCDLGIIHAAVLSDGKSHFIVTGRELRSLQRYRNKKLKEFQKRISRKKLGSNKRQKLILRKRRFLEKMERRIEYLLHSISKMVTDWCVENQILTLYIGTPDGVQRNTKKKKKTRKEIRQQLSNWSFGQLIEKIKYKLKLRGVKVQLVEESYTSGTCPACGEFRKQWNRNFYCQCGAAGHRDVVGAVNILDKSVNKQLTENRELPKIEDTKYRRVLLTPIVPHNGCKGAVA

SEQ ID NO: 1437 - protein, 385 aa, synthetic construct
  REGION 1..385: note = Synthetic
KTHRVKLNLTRTQFELVREKQMESANCWNYIVNLSKEYYFEHKQWIKKNDIQKLIKGKYNLHSQTIQAISDKFDANRKTISELRKKGNTKAKYPYKTKKFYIIPFKASAINRNAKGNLKLSMSKGRYLELDFNVENIKTAEIVWRNGYYLYYTFDNELNGVVAKGTNTVGVDLGEIHSIASVTNKGVGLILSNREGRSIKQFRNKMYAYISKRLSKCKKGSRQSKKLWRLKNKIRSKTDNQLMNLYHQTTRKFIDFCVEQKVCEIVLGDIKGVEKDTKKKKRLNRVNRQKISQMEYGRIKDYIKYKAKEQGIEVKLVKENYTSQTCPKCSKKHKPTGRTYSCTCGYETHRDIVGAWNILNKKHKYGLVDFRINHKQPINLKVSTV

SEQ ID NO: 1438 - protein, 320 aa, synthetic construct
  REGION 1..320: note = Synthetic
MQAISDKFSANRKTIAELRKKGNTKAKYPYKEKKFYVIPFKNSAINTNSMGNLKFSMSKGRHLELDFNIENIKTAEIVWRNGYYLYYTFDNGLDEVVAEGTNIIGVDLGEIHSIASVTNEGNGLIISNRTGRSVKQFRNKMYAYISKRLSRCKKGSRQSKKLWKLKNAIRTKTDNQLRNLYHQATKKFIDFCVEQQVCEIVLGDIKGIEKNTKKKKRLNRINRQKISQMEYGRIKDYIKYKAKEQGIEVKLVKENYTSQTCPKCSKKHKPIGRIYSCTCGYKTHRDIVGAWNILNKKHKYNLVDFSINHKQPINLKVSTI

SEQ ID NO: 1439 - protein, 411 aa, synthetic construct
  REGION 1..411: note = Synthetic
LTKKYLLNLSKKDQDHLLSAMKEGARLWNDLVYICRNEYKQGRWITAVELQKQVQSQYNLHSDIITSLCQRIDSNRKTARIMIKQNPKFKYPYKKKEEVTISGKNRQILNNNYLSLNKNIKIKIDDSIDLSKCTMFHIVHKKSTFYLYMPEEQPEAEIKSTGVQCAIDMGEIHAIATICTNSDKLILTGRVARSFKRFRNKSHAKLNKDMKKCQRDSRRHKRLIKAKDKLSKKSKNKLRNFYHHLTNKFVETCIDNNVDTVYLGNLKNIGQNTKRRLRHESRQKMSQFEVGTIRDLVSYKCEMLGIKVEVVSEKWTTQTCPACGKRYKPKGRVYKCSKCGFVGHRDIVGCYNILSNDVEIDLSLIDGKIRGRHPIKISTQKRSRRFRLNPCISDNISSLSNQESPQFIAGE

SEQ ID NO: 1440 - protein, 424 aa, synthetic construct
  REGION 1..424: note = Synthetic
KARQVRLKLSPEQEDLLREYQLEAAKCWNEILVIARDFYQQNDGKWISKNDLQKALKNQFKLHSQTVQALTDKFCANRKTTAELRRGGDKKAKYPYREKKFLTIPFKQMAIKRSEEQCVRLTLSKGIHLDTKVNVEGDINTAEILWSGCGYTLSYTADFPLAEESGVVLAGGDIGEIHPIAVCAEDGEGLVVSGREIRSIKQLRNKALARLARMISRCKKGSRRFKKLVRARARLISKTDNQLRDLFHQATRKAINWCIEKSVVELIIGDPQGVEQKTKKKKRLNRKCRQKVSQMEYGRVKDYLTYKAKEAGIKSCFVNERGTSKECPECGLENHVSGRIYRCKECGFEAHRDGKASFLMIRKKHKKLKTPDKFTMTHTQCVPKYRKRRLRERLKPPACVVGPGVVHKSLGYIVDPLDAAFSSI

SEQ ID NO: 1441 - protein, 427 aa, synthetic construct
  REGION 1..427: note = Synthetic
LTKEFALKTTDRVARDLKAARLTCAQVWNDCLALAKEHRLQHEGQWISKKDLEQATKGGKYQLHSQSIQAIITDYTEARQMAQTKRKQGDTNARYPWRQKKYRTIEFKQMAIRQTTQNTIRLTLWKGQHFDTGLPWQEGIGVARLTWDRNRYVLQYTVEVSTPELPTEAPLPETTGGIDIGEIHPAALTTASGDITLITGRAIRSIKQFRNKRLAGLYRRRSRCRKGSRRHRKYGRLIARACQKAENSCRDAFHKATRLAVTAAEAQGLTTVVIGDPKGVADKTKQQRRLSRKSRQKIAQMETGTIKQYLQYKFALAGIRTILTEERGTTSGCPVCGTSNHCSGREYRCSCGFVAHRDGKAGFMILRKVLPEVSTPESFRLTALRALPKYRVGTTPPVDGTDCTRRSNPVRSFATDHPAGSVILRAA

SEQ ID NO: 1442 - protein, 308 aa, synthetic construct
  REGION 1..308: note = Synthetic
DKPLLAGLLTAKAAQKRKWLTGSGLRKDVTLPIPNLSGEALSACTYAEIVWHRGHYWFHYCIDTPVAEPRHEHLPLKPAGCDLGEIHSVTLATENKALVLSGRAVRAVKQGRAKFLAELSKKMARCKKGSRQWKKYLRAKRYLQQKSDAQIKDWLHKTTKQAVDFLLAEQVTHLVIGKVDGIEKNTRKDTTKKRKTTQRRRQQLSLWEHGRLTAYLTYKAKKAGVVVEETGEAYTSQDCPFEVSPEGRRRWRRPRPRRSVVILPCCLPIAWPLPAAGTRGVRRKESHVLQLWEKVKLGYLLFQKFFSM

SEQ ID NO: 1443 - protein, 442 aa, synthetic construct
  REGION 1..442: note = Synthetic
VTHSFKIPYDKKMYSELRIMQREAASVWNDIVREATSYYFCFKKWLSKTEIQAIRRQTYHLHSQTVQAIADKYVANRETIRKLRVTDKKAKYPWRRKYYYCIPLKKASMDVSKETITIKKVEYGFQLTDLLTKKKTKNWNEKVSKKNESIVIPNRSEEILETCNYAEVVWRNGAYWFCYSVSVPEKDTSSYAFKAAGGDLGEIHSVTVATEDKALVVSGRAMRSISQFRAKVVADLSKKMSRCKKGSRQWEKYRQARVRIRQKTKNQLEELEHKTTKEVISFLEAEKVTNFVIGNVSGIEKNTKENGKKKRKNNKKRRQQLSLWNQGKIKQKLKYKAQLKGIRMEETEESYTSQDCSFCGGRHQANGRTFICSVHKTEIHRDVNGAQNIVRKKYHMETKPLLSVLYKQPVWNKRFLSMKERQEAKHPKDQPKKEKSIAGRTA

SEQ ID NO: 1444 - protein, 463 aa, synthetic construct
  REGION 1..463: note = Synthetic
RPRQVKLKLSKSQFHHCQQLSKESAKVWNFVKNFFWRTYRKKGIWLSEGSLKRYTKQRFALHSDSIQAVIEKFCGNLSSERTLRKENSSIRYPYKGKSWFCVHWKQKAIKVKNRYIHLSNSKGRQGIVFKLPVYLIGCQPRCVELIWRNGYWLSITLDLGKFDTTTSGDNSKQQNEQLQLKYNTTAVDLGEIHAMTITDGNEAIVISGRQLRSVKRNRNRRVGQLQKLQSRCQKDSRRWQQLQAVKAKVMAECHRRTRDLSHKITRLAVDWCFDHDVSTLVIGDVTGISKNTKSKKRLNKKNRQKISQWSFYQQRQYLQYKCDEIGIETVLEPEHSTSKTCPRCSNKYKPKGRNYHCQACSLKMAVHEVTAERSEHRDVVGACNIRTKHLTGVLSGKDNFDSPTVKYLRIDYPKGESKSSSVAGVNRRKRRKPFRRRLGVPEQLTLLLPTNVGTIQSRMLGKT

SEQ ID NO: 1445 - protein, 427 aa, synthetic construct
  REGION 1..427: note = Synthetic
KAIHIKLNPDKRTREYCQFLQQESAHVWNRTKNFFWRTFRKKEIWLKSTSLQKYNTRDQLYPDEPFALHSQSIQSVAQQFSANLKAAHEVRKTNPSIRYPYKNKKYFRVQWKTGAIKIKSRNIILNNGRGNKPLKIRLPRTLANCTPKIVELIWHNGYWLSLIVEVDDKESVIGTGIAACDMGEIHAIAMTDGYDALIISGRKLRAVKQYRNKVIAQLQEKMSKCVKYSRRWNKLNRTKQRVQERTRRRVKDLNHKITTLTIQWCVDHNITTLVIGDLSGIAQNTKGRLARIARQKISQWSFYTQKEYLQYKAKEVGIEVVEVSEASTSRTCPRCGTINRSKNRNYSCSNCKLKCHRDVVGAYNILTVHQYGSLVPDDLFPYPQAKYLRIPFVGKSSSSPDGGLMVVSGNKPSRAKSMCCLAYAANQ

SEQ ID NO: 1446 - protein, 421 aa, synthetic construct
  REGION 1..421: note = Synthetic
AIPKAEADDLNRESGRVYTDTLVRHYRIYRKTGHWLSMYAGKRVEDGVGGPTTLHAHSRDAVQEGFYKACKTAQALKRAGDHAARHPHKRKWYRTSVWKKAGIRVRDGVLVLARAKGLPAVRAALPAPVAALSASVFSEVRLVWDKAARRYMWHVVVDDGIIPKPTTATGVAGVDLGEIHPAALTDSTSAAAVSCRSLRSTVQYTNKRLSVLRSKQDHLVKGSSRWKRLQRRKNRFLAQQKRRERDLLHKASRAVVGWAEQNGVGRLAIGDVRDVGDGKRLKRTEQQKVSQWSHGAMRRYIGYKAEAAGIAVDDTIDESYTTQTCPSCGTRAKPRGRVYACRACGFRGVRDVVGAANIFSRYRYGEVGRVTPPVHAKYLRPFVRVAGEKRSSRLDTSELARCQGLRAETSLATVGREAAPL

SEQ ID NO: 1447 - protein, 275 aa, synthetic construct
  REGION 1..275: note = Synthetic
APEAFLEMQLLWDRAGRHYFWHLMVENYLEPAEPPGDQVAGVDLGEIHPAAVTDGEEVVVFSAREMRSLAQYTHKRLAEIQAKQARKTKGSRSWKRLQRRKGLFLAQQHRRRRDLEHKVSRAVVKWGVERQVGTLAVGDVRDAADGVALGHTTNQKISSWSHGRLRQYLTYKAQAAGITVVLVDEAYTSQECPNCHERHKPRGRNYLCPVCGFVSHRDAVGSANILSRFLYSELGNVSPPAVIKYRHPFDATGKRSPVDTGQVAWAFTTQETDGF

SEQ ID NO: 1448 - protein, 414 aa, synthetic construct
  REGION 1..414: note = Synthetic
LTQSFRARQPRSILDELNKESGRVYTLTMVEHWRAKRKKDIWISQFDAMRINDALSGSTILRSSSRDAAQEGFYKACKTAKALQKAGIDSKYPHRRKMYRTTTWKKDGIRVKNNKLILARSRGLEPIIVDMPEYISSRDLLEVRLIFNKSSNRYDWHIVYDDKLEIPNALGDTVVSVDLGEIHPVATCTLKEAVVFTARELRSTIQGRNKMLSELSEKQEQRKKFSKYWKKIQRAKTKKLAKSKAKQRDICHKVSRAVVDYADEQKANLIVIGDVRYVADGVAFNKNSNQKISQWPHGTMQKYIEYKAKRRGIATKLQNEAYTSRACPKCGNRKKPSGRVYHCPKCQWTGSRDGQVGAANILSKALYGETSRVLVSETKYRHPYLMVGDGGKRSHEGTVQVACSSIGEQEAVGF

SEQ ID NO: 1449 - protein, 288 aa, synthetic construct
  REGION 1..288: note = Synthetic
LLARARGHEPVRVDLPGSICGKKFVEARLVYNRKKSHYEWHFVVDDGIEPKMKVEGSIVAVDLGEIHPATITDGRTALVIAARELRSTGQGLAKKIASLDSRMAKCKRGSRMYRKLSKAKSKARRNTSAKQKDMLHKVSRAVVEYGVSANAKEISIGDVRDVGDEVNLGKRTNQKISLWPHGKLVDYIKYKSLMLGITISITNEAYTTQTCPCCGEKKKPSGRTYTCKNCGVVGHRDVVGACNILSRRLYGELSRVKVSTTKYRHPYKTGKRRHADAMQIARANEKPR

SEQ ID NO: 1450 - protein, 395 aa, synthetic construct
  REGION 1..395: note = Synthetic
MVAAHIENRDAGHWMTDGELKRMTKGGQFSLHANSVQALAEKLIANVRTTFSNIKREKEAGLPVTSKFPHRIKDFQNVVWKGCGSPALKIDGRRLSLSNGRGNDPLILTLPSIHSESDIAQAELDWQADHYVLLLTIDTGETNPPLLEGKRTAGCDLGEINIAAVVTEEGEGIVISGRHLRSVKQLRNKRHSDLDRLLQRCKKGSKRHRKLMAAKNRASSKAERQQRDILHRASRKVVDFCEKEKIATIAVGDVRDIADGVNKGKKTNQKISQWTHGLFTTYLKQKSRVFGINVRLIDEAYSTRTCSHCGNVRTSSPKGRIFICPSCGVRMDRDGNGAANICSKHRFGEFGSVQPGSLSHIKPIIVGHRSIYEGLVPSSRAADVSRGEIPVASVV

SEQ ID NO: 1451 - protein, 414 aa, synthetic construct
  REGION 1..414: note = Synthetic
TQCKVQIIRLSLNKTQIKQCYELLEESGKCYSEMILAHVESRKDKWLSEGELKAKFKGAFKLHSQTIQSVAEKINSNLETARTNRDKEFKSTGIIKTEYASETKRLFSVTWKKLGIKIQNGKIHLSNGLKNTPLIVSLPLKYSNYNVNIAELVLDAEVFYLHLTIDTGVVPKNPLERLKTAGVDMGEIHIAYCTSDDGNTIGISGRQLRSVKQLRNKRFASLDEQLSKCKNGSKRHKKLSRLKKKSSSKLKRQQRDILHKASRQLVNFCEKNKVANIAIGDVRDISDGVDLGKKTNQKISQWTHGQFSNYVKQKAKTIGINTKLIDESYSSKTCSVCGHVKKNSVQGRNYSCKECQSKIHRDANGSANICSKARYGEYSKVQVNQIKYLKPVKIGFSRPSEARQVADKMLTLVN

SEQ ID NO: 1452 - protein, 421 aa, synthetic construct
  REGION 1..421: note = Synthetic
TEFRVHLIALRVLSSALLAQCQALRQEAGRLWTDLVERHAQARLAGQWLSSQDLEQATKGGQYALGSQTVQALCQKLTANVATATELRRQEYADTGRIETEYLHHGKSYQTVIWKDQGVVWDRPGHIGLKNGLGRPYLYLPVPAKYGGANVRKAELLWRADHYELALTFDTGQAVPPPRETGEVAGIDLGEVHVAAITTSRRHALVLSGRLLRSFKQWRNKSHARISEKLDRCQKGSRRSKRLVEAKAKVSAKGYRQQRDFLHKAAKLTVDFCAAEGVRRIVVGDVRDIQTGVSLGKVSNQKISQWPHGQFTRYVTEKAARRGIAVDWIDEAYSTKTCSHSGHVRKTSPRGRRFRCCGCGARIHRDVNGANNICSKGVHGVYAKVQADTVKYLRPIGVAPPTRAKSLARARTSRFQAGECQ

SEQ ID NO: 1453 - protein, 389 aa, synthetic construct
  REGION 1..389: note = Synthetic
EASRQTRLCGQLWNEVLSVFNKNRIENRYLTEGEMKSHFKGFNGLHSQTTQAVIERFYSARKTAFVVRKQNPKMKFPHKRKSESPAVWKRQGISIKDGNLNMSLGKKYSFISIPWNRNETPTEVKICRDKITGKQFALCAIQFPDTELSTSDKTLGVDLGEKVLAVLSNGEQQFMLSSKLIRSKIRYRHKTLGSIATKQKTKKKNSRSWRKLQARKDRMRIKIERQLEHILHSQSKNLVEITVKLNIGKVTFGDLATLRNNKKGQSVNNNFLYGNFRRKCVYKLLSKGIASEKISEAYTSQTCPCCLTRNNLTDPQSRKALRIYRCANCGFIAHRDCVGSINMWKKTINKFEVSCPTARSRWMNPPVSVKPKCSPQKNCVIVKSMVRGL

SEQ ID NO: 1454 - protein, 437 aa, synthetic construct
  REGION 1..437: note = Synthetic
RYFVRKLTLPGRLKPRLDELSLASGALYSAVVTAFWRTLRRSAGRSKKGGPRDPRRKAVFLSSGTLQKWFPKDAEGLLHSHTCDAVVDHFVAAMDSARTRKKHDPAARFPRRLKKYFKVTFKSTAVRVRDGQLLLSTGDKKRPVVIPWTFELPVAVEIGWRESGGYELRAMYPDTRGVQVAIGEKVAGLDIGELRIAAVYDGEEVELHSGRLIRARNHYANKQQAKLDVRISNKRKLTKAGTRSSKRLKRLQRARRLMRARIKRQNKDQLRKQARTIVSTLHERRVQTVAVGDLSNIRDSIDFGKKANQKLHLWAFGQFLAELKLQATKFGLSVKVVDESFTSQTCPWTGGRKKPKGRTFVSPCGTHHMDRDGVGAVNIRARYLESLAGKGSAYGRTPTLPWTPVIAGMAPVTRGRRYRVLHAQRSNPQGMEGSTRP

SEQ ID NO: 1455 - protein, 409 aa, synthetic construct
  REGION 1..409: note = Synthetic
RFVRKVALPKSDLLDKLSHAAGQLYTQTLVAYWRILRKTGTGKNGRTPVFLSPYGMEKLLPSDPDKLLHSHTCDAVVGNFYASIKSANERKKQGCKDAKYPRRRKWFYKITWKSSGIRLKDGYLTLSTGKGVENLVVPWVHDLPTMVEIGWKKTGGYELRAVYEVGAIQALGDGVAAIDQGELRTATVYDGEKATIYSGRLVKSKSRYRAKVIAKLDAKIARTRKGNGKQPSSRRRKKLIRAKRRVTRQIDHQIRDIQHKQSSHLVSTLHNQGVQTVVIGDIRDIRKSMQYGPKANQPLHNWSFGKFRQMITYKAERLGMQVTLMDEAYTSQTCPACTNRKKPSGRLYACKCGFVCDRDAVGSMNIRAKYLGTFGRPVVGVMSPPVRGVRYRPQFSRHLALNTPRTPCL

SEQ ID NO: 1456 - protein, 284 aa, synthetic construct
  REGION 1..284: note = Synthetic
LAHRSGVGAGGAGRAGRRGLCVGWGIHPRRHADGEHMAGAVPLPEHAGRWTRRHIARGGVPGERLRPCCHLRSVRCHRNKAKATLSARIDRMQRGSKARILRRLDNQLEDILHKQTTHLVSTLHRRSVQTVMIGDVRDIRRDLGYGAKANQKLHRWAHGKVRWMLTYKAERRGMCAVLVDERYTTRTCTACGTRHKPKGRDYRCTCGFAYQRNGVGAWNIRQKYTGAIPVVGAMIPPIGVRYATPRNTLRRETPGFSRGEYQMALGLPIAPFLSQSDHNRCLVR

SEQ ID NO: 1457 - protein, 391 aa, synthetic construct
  REGION 1..391: note = Synthetic
KKTLYVTKQLNIAQTNQLDLLSLECGRIYSKCLVTFHRIWRKKGFWLSKYGMQRIVTEGELHAHTIDGVIDIFYENLNSYLVLKKTLPTAKPPQKRKRFFAIPYKSSAIKLNEGMLTLSNGRGNEKLSIPWAFDKPKTVTINYNHQKRCYKVNAVYPDFAHCIPLGEKVAGADPGDIHLLATYDGETAYLLNGKALRSKRRYQNKVKGHFQRKMDVKKKGSRKWKELNKAKKRVLGRLDNQVKDILHKQTTGLVKQMYEDGVNVIALGDLRELRSDVVAKSKRDGIKKTKRNASQRQIVHQMLSGKVKTYLAYKANRLGMKVELVNEAWSSKTCPKCLSRNDVKGRSYECNCGFNHHRDGVGSINIRSKYKYQRYVAVVGEMAPPVGLSYT

SEQ ID NO: 1458 - protein, 254 aa, synthetic construct
  REGION 1..254: note = Synthetic
LEWNYGLPKVVNISFDNGYRINTTYTGAQQRQASEDENTEDTAGVDLGEIHLAVAHTRDKTVIANGRVLRSKRRYQNKVNAYFQRKISKCKKRSRRWKTLIKAKKRVLNKLDNQIKDILHKQTTKLVSILKQEGVKTVAIGDVRNLRQNVDYGKRANQKIHQMPAGQTRFMLTYKAKKLGMSVHIISEAYSSQTCPQCLIRHKPNGRVYKCPHCGFKFHRDGVGAINIRHKQMYKEYVPVVGDMTPPVGIRYAA

SEQ ID NO: 1459 - protein, 400 aa, synthetic construct
  REGION 1..400: note = Synthetic
MYIVKKKKLKTTPQLKHLAEECGRVYSKMVKTFWRLKKTKDMYLSKGAMQKLIKRSTLHSQTVQACIDSFYFMLKAYGRAKKAGYSHARPPTRGRKNFLIQWKGQCLKLADGVLTLPNGRGNEPLSLPWAYEKPCLLTIKVGSTTSTIHACYKTAALEPIAEGRTVALDLGQIHLATASDGWSVNGKKLRALRRYQNRYKGKLAALQSKKNKGSKAWRRLQHTKRKVLTKLDNQISDFTHKATTGIVSTLHKTGVKTLVIGELSGIRENSNQGKVRNQENHQWNFHQVTWQLTYKAKSKGMEVAKEKEHYTSSTCPCCGERTKTKTRNFVCSKCGFSIHRDLLGAKNILKKYLGNKGEILDFPVVGGMAPPRGVRVKPHSPVASGFAFGNKLKSLETPGF

SEQ ID NO: 1460 - protein, 390 aa, synthetic construct
  REGION 1..390: note = Synthetic
VSVMSYSVRKFEVKKTEILEKLSLESGILYSSTVKFFWRTVRKKGIWLKPASLMRLYSSDRMHAHSADASVQAFFASLKSWRTLRKSRPEARPPVRLRKYFNVVWKNTAIRLRKGSLILSNGKGNDPVVFKEWKYEIPVQCTLCWHGTGYEIICLYNHEVLEPQVEQKVLAVDLGQIHVATTSDGTIYNGRLLRSIRQWRHKKVSDIQAKMDNKKKGSREWERLRDRKRKFLRKVENRTSDILHKYTTGLVSTCKNNGKDTLVVGDLNGYRQDNNKGKERNQENHSWLYSRTTWMLRYKAEKHGLNFRLQNEAYSSQTCPACGKKKHPKGREYRCKCGFHGHRDVVGAFNILKMYLSSSADMKRDESVVAAMRPASAIRDVKYQPYLRVA

SEQ ID NO: 1461 - protein, 363 aa, synthetic construct
  REGION 1..363: note = Synthetic
WRTNRGEISGTRPPHKRKRFFRVVWVQNGIYTEFLPGQTSLMLSLGKDGNRLRDPIVISLPDYFIPFGTPSKVEIGWRKGARGGGYEVRCTYTRQLVLPGQQVTPVGEVGGCDQGEVHPFVITSGWSTTIYNGGILRSKRRYRNKVQGHLDEIISRTKPGSKRRRKLVKSKQRQLRKLNCQIRDIEHKLTTRAVSDLLEAGVKELAIGDLRSLRQNSPSSSKATKAHPTKGRLYNQRIHQAPLGRNRHYLIYKCHRVGIQVPPLVNERETTMTCPRPGCGGKIKPSNRVYRCKRCGLRAHRDAVGSWNIRAKYLGIEPWGTVSIDENRVVGAVAAPIGVKYRPHMRVLPQVNVAGVDTTCSCG

SEQ ID NO: 1462 - protein, 397 aa, synthetic construct
  REGION 1..397: note = Synthetic
VQIVHVVRKMKLGASPQLDAFCRDAGRIYTLCVVWFWRHVRRHGIWLSQYGMQKRLRNGQPTSLHSQSAQKAIECFFHALKTWRSERKTNPTIRPPHKLKKFFKVVWKRVAIRVIDGDLVLSNAKGTDPFVVKDWRFELPVQIEIGWDGSEYELRATYEKEAKASEAGSVASCDLGEVHPACVGTEDFHLILNGGVLRAKRRYREKLKAKLSAKIDRKKKGGKRRAKLIASKQKKLKRLDNQITDIEHKLTSAAINTLHERGVRTLVIGDLRDIRIGKDWGKVQNQRMHQAPTGKIRWMLSYKAERLGWGVELQNEAWTSKTCPACGARNAPTGRVYKCPCGFVGHRDVVGQVNILHKYHGNAEGCRVIGAMASPIGLRYAPHIRCSSRRSARIPAL

SEQ ID NO: 1463 - protein, 493 aa, synthetic construct
  REGION 1..493: note = Synthetic
VDLTRKKKIGPSERLDEITEACGDVWCDTVRWFWRSYDRHGVWLSKYDMQKWMCTRTISTEKKSNAFTHPDMQAFAGKRTNSMATARGKENVAMNTAQAVVGDFYDALRSWKKQDDEKANPPKAMKSHHKATWNYTQITLEGNTLKLQTPRGEDSVFIDWPHPEPKRVEVGWQEEEWEPGIEYEVRVQFDVEPDREPIGDKTIGIDLGEKHLAAATDGEQTWLVNGAEVRSLRRYQNKLKGTLQSKIDTKEPGSRRLERLVTSKNKQLASLRNQIRDVLHKLSRRLVETLFKAGASTLVFGDIRDIRDDLDHGTNQNQRMHQWVFGKFRRMVKYKAKLAGMTVADDIGEAWTSSTCPCCGDRTLVSRDWAEVCKDCGVTFHHDEVGSLNIRKKYLDGSRWQDGYLDSPVVADKGSTATEETSRGEFASNPQCSSPRGGKTNQLGLFASGDAAAPSSTRETPTRLDGLTHPVGIRYRPHMDCGPEGSPAISSEG

SEQ ID NO: 1464 - protein, 518 aa, synthetic construct
  REGION 1..518: note = Synthetic
TKRKHIENTEVVRGHARAAGEVWTKTAIAWNELNERFGFSLSKKQAEALFAAQSLTENVQEACKEIPVIRWLACRVAEGQWEKGWDLSVPLRPVMERLEFESNPFVGDVMLQAGSQQRQQPIRRFYKHKKAFFKEHLPRWKENGCDPDEKPEPPYRKKRHARTDWVNGRWEYDGDTLRLKTGGGLDEIETDWPYPNPNSVQLVWDDAARKPMLCAQFDSDKQDLPDGFIRERSPKGTGTVGVDLGETYFAAAYDGEDTFILNGGKLRELRSLQRGEMERFNYQIEHKCEKGSNRWWKFVEAKNKRRSSIKNRIEDYLHKMSTRLVEECFARGADTIVFGDLTGIREDIDYGAKMNRRLHQWAFRQFIDLVKYKADRYGMTAYEIKEAYTSSTCPSCGEEVGTNNRRFRCSNCGYEAHRDQMGAVAIRSLFLDKEDEEDLERLSRSRVFEALRAWASGSEATASGPKGSVSEDKTQPSLSESDGSRGTGGAPTSTRATPQLEPPKILGYAPHMDCVFDP

SEQ ID NO: 1465 - protein, 505 aa, synthetic construct
  REGION 1..505: note = Synthetic
ASTHPADGGLPRDISISGGVRRDELGDEASPRTERSGSPGTRAGGTGCLVQGNRVEHQAISAGTRGGGTGAFRIGRLQKGLGATAGGCKRASKRQTHTFRLSAVHHAITHQVEYLERLISSPELFDLQEAFSALNPPFYTRINHWLDQADLQRWLCRSARYPGLAAQSIQAVADQLYDALDSWRQQRDRGDARPPHRQKTWNKVVWKSQSIRLQDGTLKLSRGRGCEPLTFEWPHAKPTRVEMVFQDGEYVLCCQYEVEPQDRTKGEQVAGIDLGEIHLAAVDDGDETLLFNGRQLRSKRRYQNKIKAKLDRRIDRKQKGSRRWSRLVQSKNEQLATIRNQIDDLLHKMSRKLVEMLLERRVSTLVIGDVREIRDDLDYGSKANQTLHQWVHGRFRRMITYKARLAGMEVELIDESYTSQTCPRCNERHKPTNRNYQCPACGFEGHRDAVGACNIRRKYLREVAEKPSTGVVEDRVSSSGVRFHANASCSSRSSHKTFPTREAGT

SEQ ID NO: 1466 - protein, 408 aa, synthetic construct
  REGION 1..408: note = Synthetic
LTRKLKLGRTDQLDRLARRAGGLWSTIAKWHWRFVRRQDYWLSKGQAQKMYCKGLGGLHSQSAQAVADNFYDSLQSWRKKRENDKYKGLRPPYKQKRYFKVQWKSSAIRLRDDGVLRLSNGRGTDPLLVDWPSDRKPKRVEIGWDGDQYELRAQYKVDEKDEPKGQKKAGVDLGERHLATVYVEDGENISVHGGWLRSLRRQHGRTYSKLQSKIDQKKKGSRRWKRLVKAKDRQLTKIRNRIEDFLHKVTTRLANVLHERRAGTVVVGDLTGIREQIRYGDRINQRLHQWAYSKFEHMLTYKAQLRGMTVERASEAYTSQTCPNCEHRHKPSGRDFDCPTCSFTGHRDVVGARNILSERYPGEVSTDTTQVAGEMTPPTGVRYQPHMRCNPASSRKTCSSRQERRPVE

SEQ ID NO: 1467 - protein, 377 aa, synthetic construct
  REGION 1..377: note = Synthetic
VEPYITKIYAEDYPLYASTKQGMVQQYFKDLSNYFRAREKYIEEDETEKLEKLRPPYKVKRFRKIIYKNNAMAFDDDGSLVLKHGKKGKDIQLPDYTLKQQPGYAEVIFNYAKRKYELHATYNVDIKQADYNTDKILAIDLGVVHPMVSYDGQEVVIYNGGVVNSKLRYRNKKRAEFQHKMSRCEKNSSRYRKLKRAKDRVLGQLRSQLDDVLEKYTSQVISYCLEREISTVVLGDVEGIRENVEFHRIVSQKIHQWCFYRIKKMLERKCEYVGLEFSVIDESYTSQACPGCGAKNKTYDRNYTCSSCSFEYHRDGLGAVNIFRKYHGEDLDDPSYVVGVLASPVGVRYDPHLCCSAEWNASPWAGRSNDTSAEKTA

SEQ ID NO: 1468 - protein, 417 aa, synthetic construct
  REGION 1..417: note = Synthetic
DKTYILPIPNEYQNLARELSMQSGKIYSKAVSFLKKINRKGLRIKQKTFYRYMEWWIHQKSFILHSQSKQAAYQQAWTNYTATLRKIKKAKKKNKNTSKIRLPYRNKKYNKVCFKDSAIKLEGDNLILVNMKGAERIVIDNVRIGIKPKYAELLYHADKGKYYVHVVVEIAKEQEAKKRSGKTIAIDLGVIHPMVCFDGNKVVVYNGGVLNSILRYRNKKQSLLQSKISGCQKGSKRRGKLQRAKTKLLRRLSNLIRDVLGKYTSHLIGYCVENGITTIVMGDVKGIRNSKKKSNKVASQKVHQWLFRKISKMIEQKAEFAGIEVVYVKENMTSQICPVCGSKNKPLDRNYECKSCGFRYHRDGVGAVNIYRKYTGESLVVGRLACPTGVRFKSHLRCPVEWNTHPWDKNCSTGKVA

SEQ ID NO: 1469 - protein, 418 aa, synthetic construct
  REGION 1..418: note = Synthetic
YKTYIFPIHPDDQEQARQISRCAGRIYSKTVSTVHKLHERKDIWLSESAMKKLIRLYAEDFLTHAQSEQAAVEQYYKALDSFFVKRKSDDTARPPYRTFKYQNVVYKESAITRMDDKVRFSNGRKGTPLYIKVEYFDGEIKYAEMIYNTYKESYQMHVVVDIESNIQVEDSDKVMSVDLGQIHPIVTFDGDNTRIYNGGKLNSFARFQNKELSRLQNKMSRCTKYSRRWRKLNRAKKKLLRKTADKIKDVLRKYTSTLIGYCVDENIGTIVIGDIKGIRENIDYGKKTNQSLHQWIFRRLTDMIEYKAEFVGVNVEYIDESYTSQTCPACGNRYKPSGRNYRCKECGFEYHRDGVGAVNIYKKYTVGSLERKSDWLEGVLASPVGVRYTPHLRCSADWNASPFRTGHSKVASAEKAAV

SEQ ID NO: 1470 - protein, 309 aa, synthetic construct
  REGION 1..309: note = Synthetic
LKPPYKKKRFMPFIWKDTAIRLSPEGVLKLSMGSSQEPILIQTTLPADTKIRQAKLVYEDEKYYLHLAIEVKNEHEEKHSFNVMSVDLGILRPITCFDGSEVISYHGGVLNSLIRYRNKKLADFQRTLSKCKKGSKRYRKLLKAKKRTLKRTKHQITDILHKITSNFLKMCLQKGYGTVVIGDVTNIRERVEGNDNFNQKVHQWCFRKMVDMITYKAQLLGIEVKLASEEYTSQVCPVCGSKNHAVGRNYECKSCGFSYHRDGVGAINIWQRYLGKKSQVVAGLAPVRGVRFKPHLCGHGVSNAPWKAA

SEQ ID NO: 1471 - protein, 411 aa, synthetic construct
  REGION 1..411: note = Synthetic
MAKHMKTYKFPAPPEYHTKCKELSKLAGRVYSKTVSLVRKIHKKKGFWLSMNTVQKYILRWAQNIPLHSQTKQALVQRYFEALKSYFKASKTNQGLKPPFRTPKYTNVVWKNQAVKLLEDGTLRLAMGNGNDPLYIPTTLPKEVDIRRVELVYDKRQDKYFFHVTVSFESQTNISGSKVVGVDLGVVHPIVASTEDKAVIYNGGVLNSKLRYRNKKLAELQKKLAKKKPGSRRYRKLVRAKRRLLAKLYNQIKDILHKYTTHFVGWCLTEGVGTIAIGDLRGIRDRVDYNSTANQKIHQWLFRKISDLIKTKAEALGIEVVFVDESYTSQTCPVCGAKHKTSTRNFRCLGCGFEWHRDAVGALNIRKKYTGESLVVGALASPVGVRYNSHLRCPVIMWSPWKPTFEWAKTS

SEQ ID NO: 1472 - protein, 414 aa, synthetic construct
  REGION 1..414: note = Synthetic
SYIVATAEKSERLDSVNRLGGCIYSKTVSLSFKTHAQKGFWLSDSGLKKYLKFKDYPCHAHSIQAIIDDYCGARRSFFSNLKTHPKAKPPNKTRKFHTFTWRATGISYKRGKLRLSMGQGRDPLWIKIDKKFHKKVPAEVSLVYNRTTKQYEFHATYMTQPKKTKAKAGSAVAVDMGEIHPIVAFDGNLNADIYNGREHRSKVRYREKSKASINRKLSRCKRGSKRWKKLKRAKDKRLSALTAQLRDMRHKITSRFVSACHERRIETIVIGDIKHIRQSIHYGKKANEKLHQWAFSKIREMITYKAKAVGIKVDFQDEAYTSQTCPFCGHRKKPSRRTYHCKQCQWTGHRDVVGASNILTAYQGWLFNPVVGAVVSPAGIRYHPDLCRLEKDWSPFSGLKSSKPSKRRQRSTRL

SEQ ID NO: 1473 - protein, 403 aa, synthetic construct
  REGION 1..403: note = Synthetic
GKTMYITKTRKQKRTQHLDNLARESGRCYSKVVSLVRKTHTKKGFWIPKGGVQKYMRHREYNLHSQTVQACVDSYFDSLDSYFEARKSNPDARPPKRTPRHFKVRWKSGAIRIKDRQLILSNGLGREPVILDGITEKPNYIEMYFKRGHYYFALVYKVDTLPKSETGIIVAIDMGEIHPIVSFDGDRATLYNGRFLRSLVRYRNKFKAQIQRAMDTCKKRSRKWYRLLKVKRRTLEKLAAQIKDAEHKITSRFISDCQRAKADTIVIGDIKGIRNTAKFSKKSNQKIHQWAFSRIQQKICYKAALVGIKVVFESEAYTSQTCPHCGHRKKPANRNYHCKKCGFKYHRDGVGAINLYNKVSGVLNTPVSRDIGNPLSVRFNWHLSSLGLTPRNLAISKERIFAL

SEQ ID NO: 1474 - protein, 348 aa, synthetic construct
  REGION 1..348: note = Synthetic
LHSQTVQALVDQYFDSLKSFFNQSNENKCPPFRTPKYHSIPFKQSAINIRDGKIRLSFGEVRTPLVFDLPKPPKYRVRTAEICWDKTRRIHYLVLTMKLDDVKATRYQKVVSIDLGEIHPIATTDGKITIIYNGWLIRSIKQYREKLKAKFAKLLSKCKKYSKRWWQLTKSKNKQLRNLNNSIKDAIHKITRYFVNWCKKNRVGVVIIGDLTGIRESIDYGSKVNQKLHQWTFAEITRQLKYKLREFGIAVDEPSEKDTTKTCPSCGKKNSTSNRNYKCTNPLCKFEYHRDGVGCLNILNKYRGDFPFSKQMELLPRSWGPWQPPQVGGVRFHFHLSNPISAEYGVFD

SEQ ID NO: 1475 - protein, 423 aa, synthetic construct
  REGION 1..423: note = Synthetic
RFHIITQKVPAKYYPLLKELRLEAGKIWSDSLNLFFNLLKKNGNTPNNSTRPLGGVNALKSQVQKAIKSSILHSQTTQAIQDRLFGALKSFFKNKKRNPNVKPPKPRKFYNLIWKNQAVRYQNGKLILPLARTTGIRLSIPLRKRKKEWLEELLRNGAEIRQAEIVFKAFEYRLILLVKETVEINPPDRNKVVALDLGEIHPFVSFDGKEVLIWNGRLLRSYKQLRLKLIALKQKLLAKKQKGSRRWKRIKRSFERQIAKVGRKIEDLEHKLTRAFVNYCKAKGIGTVVIGKVKGIREKAKYNKNANQKIHLMWRFGRLLQKLKYKLEGEGIVVVEEDERYTTQLCPVCGNKYKPKDRNYICPKCGFSYHRDGVGAINLFKRFMEKVSGRLILPVGGLTRPQGVSYSLSSSGWVLPTLRNPLL

SEQ ID NO: 1476 - protein, 407 aa, synthetic construct
  REGION 1..407: note = Synthetic
MRFVRAKRLKIESQPIFSQINAASAEVWKECCDLMEWYQYQRGYGHAHMDFYIGEDCEGWMDKNLTKSQPLHSQSIQAVRASYFKSWISYSVLKKTGGVRNLKPPNKRKKYRTTQWKKSAIIFVESSFFGKRVRLSMGAGRPKLDIKLPKNFDMSTNHLIATIELVYDYGQWELHFTYYETIEPPESGKGVMGVDMGEIHPMVCFDGQDAMIFNGRYIRSLYRLRNKVLAGFNSAISQCQRHSKRWWRLTRRKWKKIRRIDNQIKDGLHKHTRKLLDQCELRDIGTIVVGDLTHIRDNIDYSKKSNQKLHQWPFAKLITMLTYKAKTLGIKVKHINEAYTSQTCPKCGNRKKPTNREYSCKCGFTYHRDGVGAINIRQKYLGCLGVPVEADMASPLGFRLEVPVALA

SEQ ID NO: 1477 - protein, 401 aa, synthetic construct
  REGION 1..401: note = Synthetic
RRKAMRTYKLKIPYSEQLDVLNAASASVWGECLKLQEVWCYAHGSWGYFPNIKECELWMDKQLSKSQPLHSQSIQEVRSRYFKNWQGFRVLRRNGDKTARPPHKNKRFQTTTWKKSAIRFKEGLFGKQVVLSNGRRGKSLVVNLPKRFDIKNIPSIINLVYNRGQYELHFVYKTEKSVKTESDGIVGVDIGEIHPMVSHDGVIAEIFNGRYIRSLYRLRNKVIASMNTKIGRCERHSKRWWHLVRRKWKRIRTIDNQIMDGLHKHTTKFVKSCESRGIGTIVLGDLTGIRDNIKARKKERQKLHQWAFGKITQLITYKAKALGIKVELINEAYTSQTCLNCGKRNKPQKRSYKCKCGFEHHRDGVGAINIRQKYLGCLGTPVAATMASPVGIRLECRRCSA

SEQ ID NO: 1478 - protein, 417 aa, synthetic construct
  REGION 1..417: note = Synthetic
TTRHTYNINFRDDKQGTVLNLSRESAEVYNQSIDLFWNNLDNGTFLSKFDLQQYVNIPRTLLLSESYIGSIQLAHTALATYFAALKVFKVNPEAFTGCPRQPIGDKQTQLIIFKKDAIRFKNGYLLLSTKDKPLKFRWNINKGLPVFASISWKRETGWKLNLILEEEKDILEFVEDKLMSIDLGVKRIAATYDLERVITYSGKVVMSLNRLRNKINGETQSKLSGLKKHSRRYKKIKQANRQVAKRINNKISDILHKYSRTIVNDCIKNNIKHIIVGDCAGIHDGPKFTKETNQKIVQCPEQKLLKYIKYKFEEIGGVVLTTSEAYTSRTCPCCGKVKNSSPSGRTFKCQGCGFIYDRDGVGAINIYQKFASDCETIRENVSLENVSFGSSDLDVVGGLTPPIGWKYASSRDCLIRI

SEQ ID NO: 1479 - protein, 412 aa, synthetic construct
  REGION 1..412: note = Synthetic
IVERTYSARISDPRLLDLAREAAEVYNTAQEKFWEVESERGVELDKYRLQAELKGLIHVEMLGGDSRLAAMQQFSRAFSNHKAAMRSYAKDPERFNGVPNPPTRPRQTCSVFFKKENIRIRNGMLLLSLAKGFDPIKTRWNPDTGTPKFAIINWNTRRGWELHCVVEKQVKEEKLNPGRSMGIDLGVKRIAATCDDDGVVVTYSGKKIKSLVRLREKLKADVASRSSGMIKHSRRYKRLRRGLRKQVRRIDNQIKDVLHKASRTMVNYCVRKNIGMAVVGDCSGIHDSPNMGRRNNQAISQGPEQRLRKYFQYKMEDIGGRVVTVPEPYSSKTCPKCGARSKPKNRLFRCKKCGFEYDRDGVGALNIWGLGRKVSLGGALSALGRSGGLTPPIGWKYKSSRDCLVPVGPGLG

SEQ ID NO: 1480 - protein, 404 aa, synthetic construct
  REGION 1..404: note = Synthetic
IITYSYSLPHDDRFFELSKEAGEAYSISLIEFWKTYKETGKWMSKYELQAHMNGKIERKRLHSDSFIGAMQQVHANLASWKEAKKVCPDTKPPYKSKFLQPIRFKKSQIRFEDGFLKLSFGKDINGKNDYFLFRLNKELSIPSYCIISYDRAKGWKLNTVIEKEIEVISLDLNKTLSIDLGVKRVATLFDGEQVLTISGKKLKGLVHYQNKVRAKLQSDLSKKQKDSNKARKLKSAWRKRNSRLQAIKQDILHKTSRFIVDYAIKNNIGNIVIGDCSEIHDKTNLGKVNNQQVQQNPEQRIKSYVKEKFECISGQVNIVSEAYTSQTCPCCEHKYKPKNREYICSECGFIYDRDGVGAINIYNENVSFGIKPERIRLLTRPIGLKFKNSNQLLLMGNCEKSLVS

SEQ ID NO: 1481 - protein, 446 aa, synthetic construct
  REGION 1..446: note = Synthetic
VHAYKQPFKADTLTFELAKESGKIYSKAMLLNKKEHKSFKEITKIMEKYCKENRKYLHSQSAQASYQNFITNLKSFFEALKTFNKNPSGFSGKPRPPHKNKFMYKIIFKKSAIHCNNGYMLLSVKKPYEPIKIKWAKDLPIPLWVEISYNKYDGWNISFVMEEKCELLELDKNKVMTIDPGNKRTATTFNNVDSEVTTYNGKIIMSLVRLRNVVDGRIKTKQSKCKKRSRYYKILARVKRKIVKRIKNKENDILHKYSRKIVNDAVSKGIGKIVSGDNSSTHNKTDCGKQNQKIQQNPERKLIKLVEYKFARVGGQAEAGHEQYTSRTCPKCGYVKKTSPKGRTYSCSNPIKCDFAYDRDGVGAIGIMKKNVSNVSFDHKEWLDVVGGLTPPIGVKYHKKTPRLSLVSSNRNKIPNNCLASNGENSILGNFSELVNLEKLEEPHVL

SEQ ID NO: 1482 - protein, 401 aa, synthetic construct
  REGION 1..401: note = Synthetic
IRTYSQPIKATDLIFETSKESSQIYNQAIELHKRGVNFKDIGKTIDAEFDNKFLLAQSRQASYQQYSKDFKSYLEALKSYKSCPDKFSGQPKPPHKIKFIRSIYFKEEAIKYIDGNLFLSLKKPNDPIIVRWTKDLPIPQFASITFDKYKGWELHLIVEIEQSNEVVEKNDKVMSIDLGVKRVATTFDGTNTITYSGKELMSLNNLRNKLTAKTQAKYANAKKDSRRRKYLKRCLRKNIFKIKNKEKDILHKYSRMIVEDAISNNIGTIVIGDCSNTHNKTNCGKNNQRIQQNPEQKLAKYIDYKFQSTGRLVKIISERRTSKTCPECDHVHKNSPKGRIFTCKACGFTYDRDGVGSVNIYRLEVSLSHDEWLNVVGRLTRPLGIKYIPNLSIKCKTRSFI

SEQ ID NO: 1483 - protein, 442 aa, synthetic construct
  REGION 1..442: note = Synthetic
LRTINVKIELKDLESESHLFHLSTLETQVWNGCNELYLKVWNSTGRVPNQVWVMTNVLKDLKGDLRFYDLGGLSLQEVSRKVDASWKSFESLNTKFKNGELPDWFKQPSPPRFHSRRFFNTVFLNSQSIHFNSKGEIDGVNIHPNRIKGRYKPPVYLARSVKLLEGYELVGAGHSITKNGEGDYYLSLICNVKSEAEKTGEIANPYKIVGIDPGVKTLLTLVDTDGNFVKVENSVRPISIHFNLEADKIRAKRSKCKKHSRRYNRLTKTMVKCSRRKRSQIRIIQNKIAKDLSKSYGVIGIGDLDLKQLCNIQGTKTGRKGIVRDWQLNQFVNIQGQKCENSGSMLLNVNERGTTKTCSNCGYVNSSGLHLGIREWVCPDCGITHDRDGNAGLNILSRTLNTLRNQGLCTVNVPLPTLGRCVTVKYSYQSVGPSNKVNRLIA

SEQ ID NO: 1484 - protein, 438 aa, synthetic construct
  REGION 1..438: note = Synthetic
RGVIPRVIKFEIFPSEDQVRVLVATSQNLTRVWNEALAQRTSMFEEHIAPFYQELKGAGEDKAVVAGIRARLKQAFADHQITGFDQINALTARRKDSEFDSVTRNWQEQTLIMLHGAFSSFMTLRKKGDLDAKPTRHARREGEFYEIYGRSGFNVRTTGREVEWQEREGLVRRVPEQEVVLRPGKIAGDVGVVFSLPAYQSWVLAEAEKLGKFAVKQFTLYRDRRNLAEPGRFWLSLAFEWTKPETVPPRADNTVYLALGASSLGVISSQGEEVLKLWRPDKHWVPKIRAIEERMKACTKGSRKWEKLNDACRRMNQMMSRQQTQDIRELVDYLLEYHGVHFVVTELIVRSKDGKLADSSKPERGGTLGLNWAAQNTGGIGYLVLWLKGKVKERGGSVTTVKLKLDRLDGDSPPGDIAGNKLWLAKRLRESPLASTRT

SEQ ID NO: 1485 - protein, 435 aa, synthetic construct
  REGION 1..435: note = Synthetic
HSYLYRAVKFKIFPDAGQRKTLQSISDNLWSVWNDALAERVTLFEMHHKPLYEAIKTAREENDEIRLYELRLKLKQAFRDHRITHFDQCKSLTPRRKTSASFAAVPCAWQQETLKILDGAFRSYLSLKKKGDLFARPPREQRAEEFFEIQGLLSFALGVGDHKVAAQKKIASSMIRLLHEGRQAEIVLSPGKSLPGGAELRFKLASYAGKKLGEAVRVKKFTLYRDPPDMRQSGNFWISLAYEVEKTEAIPFDPNRAVYIALGASSLGVVSPSGEEVLKLWRPDKHWEPKRDTLKKRIAMCTKGSRAWKRRQNAKLCIEQKSARQRKDSDRKIVIEKLVAHGVHFVISDIVIRGKKGRLADASKEERGGVLGLNWSAQNTGIARLVQHLEQKAEEHGGSVRKFRATSKLPTDIGQGHENKIAMARRLKDDFLASQ

SEQ ID NO: 1486 - protein, 472 aa, synthetic construct
  REGION 1..472: note = Synthetic
REILPRTVKWEVAARQPDLQKLLIKTSDGLREYEHWALEAEAENYKRFEEWQTLLGLLWDIKVTFGAQTKKELLGVLMSLIIGNEEAARLGKGRGELDRLLRKFNRETRPKSFLTDFDLYSRYAPMREEDGRETKARATIPANWVLESCFRKISAAYQSFFKALEGGDPDTRTINPSEEWDFVAIQGALTQSSLKGKTFVLAPRIFPGMFEFPIPQAFQARMLAHAKRLAKFVISRRPLDLRKPGRFWISVTYEIEKPETQPFNPEEAVYVALGASSIGIVSPRGEEVIKLWRSDKHWKPLIDDIGHSLTRKATQKEPFPVQKGSNKWRKLQEKRNKMFDIMARQQTLDRREVVAIDLIEHRVEEQIFGHGLQFVVIEYDIRSKEDKLADSAKPERGGSLGLNWMAQNTGTIGYLVQWLEGKVAECGGTVRRHRLRPEAIPKGLSLGHENKIRMARALRDDFLKTYSRGAAA

SEQ ID NO: 1487 - protein, 407 aa, synthetic construct
  REGION 1..407: note = Synthetic
KELLYQSVKFEIYPDESKIRVLTRVSNILVLVWNSALGERRARFELYIAPLYEELKKFPRKSAESNALRQKIREGYKEHIPTFFDQLKKLLTPMRKEDPALLGSVPRAYQEETLNTLNGSFVSFMTLRRNNDMDAKPPKGRAEDRFHEISGRSGFKIDGSEFVLSTKEQKLRFPIPNYQLEKLKEAKQIKKFTLYQSRDRRFWISIAYEIELPDQRPFNPEEVIYIAFGASSIGVISPEGEKVIDFWRPDKHWKPKIKEVENRMRSCKKGSRAWKKRAAARRKMYAMTQRQQKLNHREIVASLLRLGFHFVVTEYTVRSKPGKLADGSNPKRGGAPQGFNWSAQNTGSFGEFILWLKQKVKEQGGTVQTFRLVLGQSERPEKRGRDNKIEMVRLLREKYLESQTIVV

SEQ ID NO: 1488 - protein, 442 aa, synthetic construct
  REGION 1..442: note = Synthetic
NDVLYRAVKFEIRPTLNQETILQRISSNLRLIWNEAWKERQDRYEIFFKPIYERIYNAKKKALEKGFTDLWEKEVAKFSQQVLVKRGFPLQLVLEQKSLFAELKKAFEEHGITLYDQINALTAKRSLNTEFGLIPRNWQEETLDALDGSFKSFFALRKRGDKDAKPPSERTNEDSFYKIPGRSGFKVTDDGKVIVSFGKLSETLVGRIPEYQQEKLSHAKNLKKFEIVRDERDMAKSGCFWISIAYEIPKPPELPFNPSKAVFLAIGASWIGIISPRGEFCWRMPRPDFHWKPKINAVDERLKRVSKGSIKWKRLIFARSKMFAIMARQQKQHGQYEVIKRLLELGVCFVVTDLKVRSKEGSLADSSKAERGGSPFGANWSAQNTGNIANLVAKLTDHVSALGGMVIKRKSPELLVEEKRLPQEKRKILLAQKLKDEFLSLN

SEQ ID NO: 1489 - protein, 477 aa, synthetic construct
  REGION 1..477: note = Synthetic
EEKWMQTYCFDLTDEEFGAENIRLATHISDSLVPLFNEVLLQVLKGDETIKELKQEVKLRGRALKQKAKEAQMEDLWDRENNEIDDEEWLERGYDQEVIKEHRDYVDEIAKLYSENKVTAFDHNYHYAQENLEAIGCTAPYVNISAGLRRGAIKNCHGAVDSWRKHLATGDYKSKPPGQQEVGKFYMLRCEPGCAVTKDRKNVRISLGDRKSSPVFELPGLDNSKNKPLHMLLRSDAKVKSFTLSRRSARNPDKKESDLQKPGVWRISINFELPLPEKKPATEYNTVALVIGSNYLGVALHDSERNFPLNLPLPHKHWFPIIGDIEGRANVPWRKKGSKKWRRKMFGVQKKHSGGRQACYRYMARQQKQGEYETIADHLIGCGVHFVVSKPSINHPKGLADASAPDRGGDTGPNRIISSTGVNSLVLKLKQKVKEFGGSVTEMEAPPLPERFRFWDSGPKKVIVAQLLRNQYLAQKK

SEQ ID NO: 1490 - protein, 354 aa, synthetic construct
  REGION 1..354: note = Synthetic
DLNWVPIKATSYSTIDQLFRQNLLKPSNATLSGPKGICTLQLSSDADLQVTSDQSITIAGQELIADVYRQPTHAYRALVEASPAFRQYPDLEHLYLLVRQKPYWNQQEVLEELARLTRAGRQPLREPQLVVTPTTYIATWQPAETYLRQLLNGHWFLGLTYRVTYRPAQQALHKVKVGLDLGMAPRTAVYTSTGESKLFEPTDIVPASYLVESGRLPQNQKELLTQLLYTSGREDAEKVVAWLNYYANRVTAEKLTHNRMNDRFIFVGRDHAIHDHHFSALSQYLNASRMDFLRVDPARTSQECGHCLEKTGKVVRGHRWRQIFTCPVCGVTRNAHENAAHMVLLRGEQRRRAG

SEQ ID NO: 1491 - protein, 353 aa, synthetic construct
  REGION 1..353: note = Synthetic
DLHWVQIRHSSYSRLGPLVQAGALQPYLGRLSGFPGAQIWRVDSPLTVQSDHQCSIAGVPLQAALHHQPSHAYCAMVAASPHFTQYAGTGELSRLLRSHDDWDPGGFAHALEATVRQGRVPLPRPALAVPPTTYLTYWLPERSFVSRLSNGHYMLGLSYTVRYVPPPGLARRSAVGLDLGIDPLTVAHTDTGATRYFRPTSLRHVRQLPWLSADAQMLLRDLIYASGRLDAEGIVAWLNFHAHTVYAERINHMGMSTHWIHSGRDRAIHDHHFSALSQYLFASGVDFRRVAPHHTSTLCAPCFEHQGRVVYGLRAGDRFRCPACGADLDAHANAAHNVLLRGQMLPPRGRAAA

SEQ ID NO: 1492 - protein, 360 aa, synthetic construct
  REGION 1..360: note = Synthetic
DRHWIQIKKASYNTVATITQQLQSTRADHLTCGPRGIATWRLSSSAEIEVLNDEQLTIDGQTVHAEVNHLPAHVYRALVQASPAFTQYQDIDHLYQQIRNGKQKWDTAQFTRSLEEIAQEGRRPDQVPHLVSTPRTYSATWHPEEVLLRVNKAGDWFAALTFTASFQRLSRSITPVTVGLDLGLNPLTVAYTSLGESHTFSPTDLSHLDQVAGSRLSPAAQKILQHLTYASGREDAEKIIGWLNHHASRVFAERLSHRAMNANFIQQARNLAIHDHHFSALSQYLYTSRIPFRRVASYSTSQLCACCFEKEGLEVRGELGFTTFTCPRCKTVRCRHENAAHNVMLRGLNLPPRCKKSQAG

SEQ ID NO: 1493 - protein, 354 aa, synthetic construct
  REGION 1..354: note = Synthetic
DHHWMKILRPSYSTISDLIDQNHLIACRANQCGPRGDLTYQLSPASRIQVINDELLTIAGQEIMAQLNHQPTTAYRAMVLASPGFEQYPDIDVLLKAARHPEPDWSPERFVALLESRVSRGRQPDPRPRLVKEPTTYKSIWRPEQTYLRQNLKGDWLLGLTCQSQYRSGRTGQNKVAVGLDVGLDPVAYAYTAAGQSQEFKPTSLSHLNAVKVMSLTPGARKLHEHLTYASGRLDTEAVIAWLNYHASHVFSEKLSHKGMNRNFIFDARDRAIHDYHFSSLSQYMHTAQHLFKRLPARFTSTYCPCCRERERVLYKGQRRGDSFHCDRCGHRGNAHQVGARNVLLAGIERYGAG

SEQ ID NO: 1494 - protein, 359 aa, synthetic construct
  REGION 1..359: note = Synthetic
DRHTTQISRNSYDSCERLVRCGDLMVKRRPRSEEADPLKGVRAEETYTLSLNTRFAVLHDGAVRIGGELIHAQLSCLPTIAYRALVTGAPGFTQYNGIQELYQRVRLGQISERTLPTELERIVRQGRRPDPVPRMVTRPRTLQSRWLAQEVYLFKTQAGDWFLSLSFRTPVQPLAPNPSRRPFGLDLGLDPVTVISDGRTDQFFTLTDLPFLRRDALSPDARALYDQLTYASGRKDLDQVIGVLLREASAVYAEKLSHRGMSCGFIHGGRRRAVHDYHFSWLPQHANAVRLPFRRPGAAWSSQTCSVCGERRQCSRKGDRFVCLAASCQSSMDAHANAAREMLQRGLGHHQERSFPTWE

SEQ ID NO: 1495 - protein, 357 aa, synthetic construct
  REGION 1..357: note = Synthetic
DHYDVPAHHGSYPTFALLIEQGVVVPLPRPEDERADPLKGVRSAQTYRLAPGVLPVVTGDRHLTLAGQSIQADLYRLPAHAYAALVEASPDHRAPLCLDVAFTLAREPDVNVCDVRLVLEQSAAHAPRHLDAPHLVPSTLPLKSSWLPEDTLLHMTPGGHWFVTLTFRTTWLTRPLPTERGRVALDLGLFPLTTAVHEDGRVQVFHSTPLTLPDRAGLSRAAQLLHDQIVYANGRQDAEQVTGYLFMHASTVIAEQLRIPNMDRGYVHRSRDHALLDHHHAALPQALNAARIPLYRLPAGYTSTECPHDTCRHVSPANRHGSRFICVRCGFTTDAHVVAGMNLLRRHERTARRHVRR

SEQ ID NO: 1496 - protein, 346 aa, synthetic construct
  REGION 1..346: note = Synthetic
DQHHVKVHRKSYSSINALIGKGFFVPVAKDDTIKGICPTATYRLQDKADIALLNDRTLTINGAPVNGCYAHVPSPAHNALVAGSPTYTAYPGLDQLLTSARTPTTYPDYLTALINEIVKEGAQPTRAAPMTTPSQQFRAQWLPDQTLLHLTAGGDYYCTLSFDVRFTRVSRVATPCAVGLDVGLSPIAALHYDDGRPQVFAATPLVRPDMQTLSCKGQALLDDITYASGRQDAEQVVRHLVYSASEVFAEHLRLGDMHRRYVFTSRDRALQDFHQSWLPQYLWAAKIPFFRVASGYTSTECPKCRHTSPNNRCRDHFRCQQCGFGGDAHLVAASNILRRGRRGKRR

SEQ ID NO: 1497 - protein, 386 aa, synthetic construct
  REGION 1..386: note = Synthetic
DQHNIQISTSSYHAIRKLIAEGLLIPAERAPEVDNPVKGINGAQLYVLAPDCEFVIRSDVECTMGGVPIRAKLYALPSPAYHAVVRANPFTQYPGLDELRTTIRSSATGAREGLRRAVQQGRQPDQRVVVAAESQQFVASWLAQHTLVQIKSLPTRPAPDMFLTLAFHTSFTGVFPPRREAVMGLDVGLQPHTVVARDDGRVKHFHLSPLAQLPTQCLPSAERELLEVLQYAQGRADFEEVVAYLIGHASHIYAEALEHRGMSPRYIVRSRRLALQDAFYSHLSQYANAAGIPFTRVDARHSSTTCPVPVCGAQGERARDVFRCPACGLQRNAHEVGALNVLARGLAGGVHLRTGQWRISDQRGESAQDDFAEWANAYSFPGLRRR

SEQ ID NO: 1498 - protein, 366 aa, synthetic construct
  REGION 1..366: note = Synthetic
IHAILPIDQLSYPTIDRLFQDEQLTRRPSQFLQHNRARGILYHTPPCSVTARNDTTLQVGEVTLQVALYRLPTAEQQALIAASPAYHQYVGLHDLSVHLRSPATSQGRAISAIEAVVERGRHPARHASLTLPDALFQARWQTDRLILQQLAGQWFVVLHFDFRCTRLDLITRRTEVGLDLGARPLIYACTADDDQFTTESCHVPIRGLRGTLLEQVQESPDLLTMLDRITTAWHRRELQRILDRLCREAAVVYAEDLSYDDMFGPYVNGARRNGVLDFHEAWLHNRLQTVGIPMEKIDPRGTSRRCSFCKGHPYGQRHGSTFTCRHCKCTVNAHWNAARNVLREGREKSVIWHSKPGTVLPTMLPA

SEQ ID NO: 1499 - protein, 351 aa, synthetic construct
  REGION 1..351: note = Synthetic
VHHILQLKRHSYPTLQALIRSGQLKGNPKLRLQHDRASGLLYEAKPELLEALSDSTLLYGDVALHTELYRLPSSEYAALVRQSPRFQQHPGLEELSVALRSPTLSVTEAARLLESAVAQEPQPDAQPRLVQPDSLFSAVWDRERLVLQRSGDDWFLVLFFQVQATQPDLFTHRLEVSLDLGSKPLVYASTSEERAHRTQPCETDLIWQVRSRLSPQARRLLDRIVFSWHQAQLQRVSDFLCRHAFYVYAEDLRYKDMKPTFVQRSRRNGVLDFHECWMHTRLQLAGIGLEKVNPRHTSLRCSYCPGHPFGHRDGDIFFCPTCRRRMNAHRNATRNIMRLGMVKAKRWRRAA

SEQ ID NO: 1500 - protein, 336 aa, synthetic construct
  REGION 1..336: note = Synthetic
AQQIIKAAPEARLQHNQLRGNLYKPTYVIPLEPLTDQMVKVMDYHLATDLYRLPSAEYSALVRSVPAFRQPPDLTKILQATSQHPADYVWITSPKSRYETQIPILSLPNEVAFTATWDPGRWALLERHGEWFLVLWFDLLCIGGGIKGTADVALDLGASPLVCAVCPDGFVEDVESQLPATLSQFADLFRIDRALHNRVEFELQRATLLRFTLFLMSYATTVYTEDLTYRDMDKTFVRWARRTGLLDWHESWLPNRLAAAGIPLEKVDSRGTSQCCSACQHPHGQRYRSEFHCPRCGNEIDAHENAARNILLRGQAKGAQWQHAHIRTRQRRGVIT

SEQ ID NO: 1501 - protein, 335 aa, synthetic construct
  REGION 1..335: note = Synthetic
NTYNVRVLRPGYADIGQAMEQNQFKRAEGYRSGGGQGQLWQLAGGQATDQAALDDRSFAMGQTVIQANIHQLPGEAFAALVTGSHGQFERQRDISRLLTLVGMGAGAVVGAAAQTPADALSRLSLPSCVWKPSETRLIQQGHDWLLSLCFETAGGWTPQGRRAAAGVDIGLQPLATAVIGDRFLATQGPDENQVRQMNGFRPDVVEVVESLLAGQGLDLLTDELIRSAGYVAVEALTFSGLREKDSFKRFVSRARASAVVDWHQCWLPQQLRNAGIPFTRVDPRYTSQQCQCGSRMTERDGSHMHCYACGWEGDAHRNAALNICRLGQSRLRRAS

SEQ ID NO: 1502 - protein, 349 aa, synthetic construct
  REGION 1..349: note = Synthetic
ITCNIRVARASYPQLEGALGTGLRQDYGRISGLPRGTVYIPAEPLLIDQQGLDDHTLQLGPLVVGAQLGHLPSVGQAAVVAASPAYRQFAVAPLLAPLRGALGPAAQRRWWGELEAIAARGAQPGLPLQTATPGTAPARWLRGETRLVQSGRHWFAALAFELPARIRPPGERPGAGIDIGLATLATAALGETAATASRAAAPAWTHGPVGLRSPAHRVLYDALQYAAARASLEQLGERLIADAGFVATEELDLSSFQSRFPQRARRLAVIDWCWSTLPQMLHAHTIPLVRVDPRGSSRECHACRSRAPGQRQRRRFACHNPACGVVMDADLNAARVIGQRGAAALHRGA

SEQ ID NO: 1503 - protein, 342 aa, synthetic construct
  REGION 1..342: note = Synthetic
RRHVLRVDRRSYAQLQAAVQQGLLLPCDTVVGSMRNGTVYRPAPWSLQHQQLLDDDRLQLGDLVIQGAMTHVPAPEFRALVQASPTYMTYPGLAPLVQQLRDQTPAFKDDLWQAGLRAAVAAGRVTVGVNGTVVGPGPAYRWLPQETRLTQHLGHWFVLLAFEAEATPRTTSTLVAGVDVGLNPLATAVCRDVAVAGIRRADLRGLRIEERLLGEHLLYAAARGALCDLTKWLAERAGVVVVEHLDLTTFASRYPQRSREHALTDWQMSWLPQELHARGIRLARVDPARTSQMCSVCPSFTLGTRVGRVFECPNGHQIDAHINAAQNIIRRWWATRRRAHQA

SEQ ID NO: 1504 - protein, 358 aa, synthetic construct
  REGION 1..358: note = Synthetic
THHVIRVDRSAYPQLKQAVASGQLQPSAEQLDVMTHGQVYRPAGPLLTAQMLVHDRELQLGHLAIAGEFYRLPEAEYTSIITASLGVYRQYPDVYPLLTALLTPMTPADETSWWQDVRGAAVQGRQLASGADMVDDIWTPTAWLRDRTRLIRLGGEWFVVLYVAQPPRRAVPEGHDVIGVDIGLHPLATAAWGQQHAVTWSLAQPAVPAGESAEVRTLAEVLTYAAARAALEDLMVQVLPQAGTLVLETIGYAQFRGDFTVAARRRAVADWHQSWGPQRAYARGIRVVRVPAAFTSQTCSACPAHTLGTRQGPTFTCPQGHVLNAHINAAKNLVRCYWGLQARARRRRAPAAPGVVRP

SEQ ID NO: 1505 - protein, 357 aa, synthetic construct
  REGION 1..357: note = Synthetic
THNLRVSVDQSAQLRELVRTGWMRQTTEPVSGLAGGRVYVPNAAALTRQCGWHDERLQLGDVRLQTQLYRLPTLEQTALVQASPGYAQHQDERLLTQGLLGQLGPAQQRTWVRQVIQTTCQGRRALPVVLGGGGVRWLQAGTRLVELEGLWFASLTFELPTVPRRAGGIAIGIDVGLSPLVTAAGPGALVQLAPPALPDRLRWATFAAHLDLLPPTAQRELQGRIQRLHYAAARQQLDQMTAWLLGQAACVGVERLDWRTFSTDFPERGREMAMVDWLQSWLPQRLYAAGVRLRRVAPYGTSQGCHLCGRPGARTNHQFVCLSGCGVMDAHENAAHNVRHRAWGGRPYARRKRQRRR

SEQ ID NO: 1506 - protein, 353 aa, synthetic construct
  REGION 1..353: note = Synthetic
TRYNVRVADADASQLNSLVHSGGLLRQHQPISGMTGGEVYVPEAAALAGQHVIHDGLLQLGNTTLAAELHRLPVQEHALLVAGSPGYMEYPQQQGLAHGLLRPMNPAAQKTWVNRLVASTVQGRAPGVPGLVAPPPGTWRPEETRLVCQGGLWFLSLAFELDAVSRPQRLGLMGVDVGLAPLAVAAGHGGQMLSTRPLHLLDQAGRHALNSQLDNLPPSQRAEVQTRYAALVYGAAQAELATLTTQLIGCADTVAVEALRFGTFRSNFVERARELAVADWVQGVLPQRIYAAGGRLYRVRPAHTSSRCHRCQQTGQRAGAVFTCARCGVLNAHHNAALNIRRRAWRVIRRGRR

SEQ ID NO: 1507 - protein, 345 aa, synthetic construct
  REGION 1..345: note = Synthetic
TRHNIRIANRQAWQLDELTRTGWLIAEDRPISGMTGGQVYRPARVTQRALDDNQLLIGEVSLQTELHRLPQAEYWALVCGSPGYTIYPGTEERTDALLSPLTPREQQAWLGDLVESVRAGRVPAAGRTVTVVWQPEGTRLVRLGTLWFASLQFAAPQPRKPARINRVHLGIDIGLRPLAVAVSARDTFCPGYVQRLDDLDKDLADLPLPLLEDVRAELGRVQYAVARQSLHGFTGQIMEFACSVTVERLNLTTFESDFVAQGRREAIIDWHQSWLPQALRVAGLAPLLRVEPYGTSQYCSLCRRKGQRDRHRFACPRCGVLDAHVNAGRNILNRGWAVRRSKARN

SEQ ID NO: 1508 - protein, 281 aa, synthetic construct
  REGION 1..281: note = Synthetic
LDLPLYRLPSAAVNAVLQESEALIPDVGSLEALLTRPCGWQWWSAVQDIASQPSRAGGVPTGPLQQTAQWQPGETYVTMNRDWITVTLAFDVHTTHMAGTHDTVIGVDVGQTPLAVALGDQFRSVLPGLPPLPAMPLGVPEAAMRLAQVAVYGAARQQWENLFALMLPRASLIAVEQLDFRGLQARFQQQCHDHGINDATLAWLPQLAREAGVQIARVEPAGTSRLCPICVRPGDRQGAILHCATHGALDAHDVAAHWIRRLGELQQLNKWQAKCTARRSR

SEQ ID NO: 1509 - protein, 399 aa, synthetic construct
  REGION 1..399: note = Synthetic
AKRAILIELPKGRCDIEYIKRLMALTNLAYREYEVWIPGLPKTIQHQLYEFKNFKKRLVFGTTPKKWSAETWLPLKTLRIYANDSMKGDRVAPVVLDFKSNTIRLCQVCRNEPRYVVELPMPKWVIDRVKEGGDVRFAMIGLKDDKPYLALVAERVVEPYQPSNYMLVIDVNAWNNGIAWGLIKDGFIIKWKPERPNLREVDNLYNLSVRLSGEYGKLKRLGLDKTEDGKRLRKKIKKLRKRLYTKLRDYVQKLVYRLVRKALKHRALVIIDDMTGESRKELIEEKIPTGLRKLYLVYTRMFVRLLVTQLEWYGVPYEFRRLPSTVCPVCEHELTQEDDRVMVCTNCGFKAPRDKVPMYWAIRTINPSFTKISVAHIKGGQPPRPQGDPPTKGGKGPKV

SEQ ID NO: 1510 - protein, 379 aa, synthetic construct
  REGION 1..379: note = Synthetic
AHRAILIRLPRDRCNVDYIKRLTALTSLAYRGFEVWVPDLPKTIQHHLYGFRNFKGSLVFGTVPKRWFASTWVPLKTLRFYPDGSRKGGRYAPVVLDFKSSAIKLYQVCRNERGYVVEVPMPRWVVDRLSEGGDVKYAMIGLKDDEPYLALIAEREVEPYIPSDYMLAIDVNAWNNGIAWGLIKSSKLVKWKPERPRLREIDGLYYRSVVLSQKYGKLKRLGLHKTKEGKGLWREVRRLRRRIYAKLRDYAQRLAHRLVRKALRHRALVIIDDIIEESRRELLEGKLPSGLRKIYLAETRRFVKLLIAQLEWYGVPYRFKRLPSTICPICHHELTQLPGRIMVCGNCGFKAPRDKVPMYWVLKLRCKMIEPEDEDCPHR

SEQ ID NO: 1511 - protein, 369 aa, synthetic construct
  REGION 1..369: note = Synthetic
AYRAILIPLPRECDARYIQRLMALANLAYHGYAVTIPDLLRYVQHQLLSCWQRFKQSLAFGTAPKRWLARAWVPLKTYRVFPEGRRIGDKSAPVALDFARGVVRVRQVCHNRPRYVVELPMPEWALERVTEGADIKFAAVGLKNGRPHLVLAAEREVQPIQPGDYALVVDVNSWRHGIAWALVRAGKVVSMKQERLCLDGLYRELLRLERKYGALRRLGLHETPEGKRLRREIGHKKRKLHAIVKDRAQWLAAKLAGKALKYRAKVVIDDVLEESRRGLLEERLPRGLAKIYLSGVRRFVRLLANQLQWYGIPFEFRRLYSTVCPRCGGRMRELPGRIVRCESCGLSMHRDLVPVMWYLKANGLPLTPA

SEQ ID NO: 1512 - protein, 474 aa, synthetic construct
  REGION 1..474: note = Synthetic
GYRTLVLRYELSRLPPEVVSRIPELLLVQEEFRRWISRWMRDPKKTPRPAENPLKRFVVVFLHILGNKWLDSVKKSGVEVRSTKMPLFFDAQLRLNGERDIGRGVFVDLPARQIRIRKWSSQRGAIVLQLNEESVKWILERVREGGRLKLAAVWVGESRRNRNAKLNVALMFSREVAPIKFKRLLVVDLNALHNGLVWAVVEGERMLKKGVLRPDISKVLHLQKIASRLDKLCAEDDRVCGEAVAVKSRIWRLLKTWEEKAVKELILVARKQKAAIVVDVPNDNSVRELKEGSYASEKKIFLNFGRLRRRLKEAAAWHGIPYYEKRLYSTVCPRCGEKMKELSSRRVKCICGFEAYRDDVPIIWAVKLYPQLISFSSSAGNCLKRFSGVAGGLLGQLRRLGGPGESCGCIPSSPHAASPFPLLRAGLLPAPAHGPRSLLETSSNTSLCASTSAASTRAKRKPGGCSASSDALVP

SEQ ID NO: 1513 - protein, 416 aa, synthetic construct
  REGION 1..416: note = Synthetic
AYRTLRVEIPWRLVEERPDVLGLAVRMRLAVEEYARRLLKELTGQEEPKLAPEELVCLLTPDRRELARRIIEEVFPKYGLKRYIAEWAKFFWRDVVFHRAVPLNAQLRVGNERDISMAVFVDLKSCIVRVRKLGIPPFAVKLKKSNVAWIRRRLEEGAKLKLAFLGVEKRDGEKEPTYDKLYVALVFAREVQQIEPKAIVAVDVNRLDHGVVVGLVVDGKIVRRMRLLDENVVRELRRLHEEISRLDEQAAREADPARKRRLEDRARHLASKRFRKIRGVVKYVVSEIIKLAREHQAAIVVDTMEEETYLERKQSGESGDKKHLYDGLGQLRRRLQALAEWYGQPYREVRLYSTICPRCGAKMEELSNRRMRCPSCGFNDNRDNVPLLWAKKRYWELLQKQPVFSSVSTTITLLTS

SEQ ID NO: 1514 - protein, 417 aa, synthetic construct
  REGION 1..417: note = Synthetic
VYRTLKIEIPWQLVEERPDVLGLAVRMHLAVEEYVRRLLKELTGQEEPKLTTEELDRHLTPDRRELAHRIIEETFPKYGLRKYFANQAKVFWRDVVFHRAVPLNAQLRVEDERDVGRAVFVDLKSGVLRVRKLGIPPFVVKLKKGSISWIRERLQEGAELKLAFLGVDVRRGKDPTYGGLYVALVFAREVTQIEPRALVVVDVNRLDHYIKVGLVVDGRVVELLKFPKRGRVQKLERIHVHIRQLSRALAKVDEDRDPRRALDLQRQLWKLKTKRYGIIRDIVINATREIIKLAREHQAAIALDTMEDDTYRELKERNGDGVKKHLLDGLGQLRKRLQALAQWYGLPYLEERLYSTICPKCNAKMVEENGRFMRCPACGFKAHRDNVPVIWAEKRYWEILQKTKQPTFSAAVTFLTS

SEQ ID NO: 1515 - protein, 420 aa, synthetic construct
  REGION 1..420: note = Synthetic
GIKCTRVEIRRLNNDAENDARRKIWRSIATECLRATNCFWETWWQWHLAGQSQTALATWIKTLIAWHDADPKTRGKKPPCPVKAMAKEASNIIYHRLTETCQNLHTRTIVLLTNRLTKRLTSQRSAHGSLAWWCNLLLYRERTPASIDPQPIPFDKANSKLLPPTESGGNWGIELRLARVAKGISVSQLCELWTSGKKRHSIATILSRIASGEYIAKGSQLLLVRGKWYAALSYQMPDADKVSLSAAKRAILLPGRNDPWLLQIEGGVYWRGGTGRHIAAVRKRVIQERRERQENYRWAATAQKGRGRPRATAAWTRLRSVWTHCCTNYNRHVAKAIVDECVRRGVGQLEYWQPEGKRSDSRFLGRAGKFDGYRDQTTYPWYQMALLLSDKCVEKGITFAVRKFGHETKENPADDVLQTV

SEQ ID NO: 1516 - protein, 417 aa, synthetic construct
  REGION 1..417: note = Synthetic
LVSVTPFEIFKFAGGDKARRAQWKLVSEECQQIHNRVWQLFLQWHSVNGSVAKIKAGLEALAAWRAAGGDKETKPKPEVVAIGSELSKIIYRDVSDGWPDVHSRTRVLLLNRLVSGIRTRKACRGSLPGWINILFCREGIPSFTHPVPIPFDKVNSHLIPPDDENDNWRLSVKVERSPSDGHSLVDECELMTRKRKTRRIAGVLSRIAEGLSSFRGSYLVCDRGKWVAMICHTSAAEQANMLDSTRKAILMPGVHNAWVVKKNGMIRRRFADRNGEARHVLGMRRLIFGERQERQANYRWASSSLKGHGRGKATHGWEKLSSRWRDFVKRYNNEITTKLVKECVQDGIGTIEYYQPVDFQRDRRWLTGKDYRCGWDYFQVKTMLSQKCQRAGIVFTTKQIGAVEEGAKPATIPRKTA

SEQ ID NO: 1517 - protein, 472 aa, synthetic construct
  REGION 1..472: note = Synthetic
SVSSGDVRATRIEIFRFCGSDKERREVWRRACEDVQEAFNFLWRYWMVFHTLNDSAAKIRESLERYRQWHQAEKKTRGPKPKWDVDAFPNTGELKGGKVVSQSWDFAHGKSARKGITNPPDLQNDLYHVVAKNFPRLTSDQISLILQKWSKSLKTRKAAKGNLPGWAAIILGREAIPSFTRRMPIPFTKRSCPGGIPLRRDGDKWILDVKVDRVQVDSCDLMLNREKTGSKRAIVSRIMSGEYVFMGSAIQYDDARNKWYAMISYRMPASVKPDLDPSLTLIVRPGRHCPWRFMIVGSDSVSGKSFGRFGHGRHVEFARRNIISERMSRSEHSRFAGSNSKGHGRQRGDAAWTKLSSRWKDFAKRYNNEVTKRISEWIVDRGIGRIVFVQPKRESVNQRRFLSTAGNSERSGMSWEYFQFATMLRQKCERLGAVVEVKQQNTEKTAPVTKGIQAARKTTRKARKSKGEKCKP

SEQ ID NO: 1518 - protein, 469 aa, synthetic construct
  REGION 1..469: note = Synthetic
PTAVLEVKLGRPLQMPAKRLEKLLEQARRDCCRARNAAIMHWYHWRVTHPEWTPGAPYDAPSPKRKLSPRVDRRKESAQYRRLVEEHATETNPKKRDRLAKKLAKYDEPMKPPTDSPVGPRLFLSRELYAAGCAAAIKLAANLASSCVQDVLSRLKSNTPYDHDGSARFVWQAILDHEVSVPTWRGGKIPMPSKETCIGYDGLVLPGKRPGAADVARAAESGAAIRFALLSMASGYATRSPIVRLEVGDLSLGRKRIFRKICTGEYKLSDSSLYEKKGKWFAQLCYEAPTEAAGLPEDRVLTIGPAQPDDRRPFVATWLDDEGHARRWYLGEGKPLVAEFRRVKARRRAIQYRYRDGMGSGHGRQRWARAIKPMSRAVVDMQSRFLKLLSSDVVKLAIREGCGTIHYREPTLPVRTKEWFATQDMPLDWTKLESKIASKAKQKGLRYEKTRIGMKEWKPDDESKSAAAG

SEQ ID NO: 1519 - protein, 418 aa, synthetic construct
  REGION 1..418: note = Synthetic
PIGILEVKLGRPDGMPQRRLWLLLKQTQQKCSTVRNATITHWLVWCRLHPDWMPGGEYEPPPRRIKRKPKLVDPATKPAKDPPYAPREFLTRELYCVGTAAAPTLNTSVASSCVKEVSEKLRAKTPYNHEGEARYTWQAILSSEISLPTWRSGRIPAPRSVTRLVYTEDKCSLKVSLLSRQSGYKLLAPTVNLHVSDLNTARRKILKRLASGDLRLADSQLVERKGIWYAQLCYDVPVMGLGLPVDRVLTILPSLPEGRRPFVAIWLDEQNGREKTWALGNGLPLVADYRRVVARRRALRDRYSDGCGTSHGTGRWARTIKPLSRYVVDMCSRFSKQTVADIMALALHERCGSIVYREPTMPVREHSWFAEQDVPMDWTAFEARLAFKCQVAGITYPDPRKNRIGMAEWRPKKEKNAG

SEQ ID NO: 1520 - protein, 419 aa, synthetic construct
  REGION 1..419: note = Synthetic
RIGVLKLQLQAADGMSRRRMYESLATAKGAANRAKNAAALNWYLWRTQNPRWQPAQRTDKDGLPKFNQRGEPMLENAALSQAAERAMYTAARAAVPELYSLITSRCVNDVIDMLKADTPDNHPGKAKKVHEAILLHEFQLGNYNRPQSRSFPVPGKAVYLFYCGLCNRKSDGITRRIEAFAGSSAAVRFPVWSRDAGQHRVDVLARIAVSKMRKAYRHTLRRIAAGDIKALDSDIVEDGGKWFLHLFYERPAKISNLDESREAVLTIGGDNSFTLMLPDATPRKLGSDEYLYAQLLRMIGRRKAIEFSTRFGQGRGHGRGHIHAIQSRSNRQQRHQIQAFTNNLRADVMKACVRANCGKLVYREPTLPLRKLSWFAQQGIEFAWHEFGPELSRVAVREGLKFRIDRMGVPEWKTIHSSP

SEQ ID NO: 1521 - protein, 198 aa, synthetic construct
  REGION 1..198: note = Synthetic
VPVETRVKQNENYHNTIGLALGIRNMFVTDQGNVYGEKFSEYQYALADFVREGNARYQKNKGNNPGRKKYTAGKDRLEATLHTYINAEINRMLQTEKPAVIYLPKLPPPSKAGVNKKINYSVNVWQKGYVKSRLTQKCRERSIALINVWGKDISNACSQCGAIGKKTKDVFICNACGANLPERENTAKNVLQRGQTSS

SEQ ID NO: 1522 - protein, 300 aa, synthetic construct
  REGION 1..300: note = Synthetic
ELPGGWNETYRALCEGLDVHKLDQYLRRQVRRHLVRPHAETAEGFSTAPKAYRYGDHGIYLAMKESRQRLFILLTDNNCYSRQLYIRLYPEEGNLTINVPVEVRQRHPAGYEGEIGLALGMRCMFVTDTGNAYGERYLEYQTALTDYMRERLPGHRRNAKNNPGKKKYNAGKARLTAALHAYVNAEINRMLETEKPGIIYLPKLPANSRAGALGKVNAAVSMWQKGYVKSRLLQKCRERSVELKEVFGKGISTQCSRCGAEGTREENKFCCAACGLEMPERQNAAGNVLKRGMELKSKEE

SEQ ID NO: 1523 - protein, 436 aa, synthetic construct
  REGION 1..436: note = Synthetic
LSEGMCRTVCQYSRDPVPAGDMGKLLEIAEDFRKVKNYVYARYGGIGSLSKISPGYTVQNEMTGSGLRERLGMPSVYFYLAMFEALGDIRGQWSRTRARVGQLAGQNGNFTPEEKHYLRFLLKVDAALDGVLNGREPVLPEGIRRQREELAGKVDAERLHRYLCRQVRRHHVRPHTERADGFSASERAYRYGDHGIYLSVKEKRKRVFVPLTDGNRYGCQVAVRLYPGEGRVEVRVPVRVRARSHADYRNIVGIALGMQAMLTTDRGHAYGEELGRLQAEYADWVRRQTAVHHADGGKNPGRKKYNARKHRFEEGIHGYINQELNRFLRTEKPATVYMVKLPGAGTIGPSRKINHSVTMWQRGYIRKRLVQKCREQSVELLEVLGKDIGRECSRCGAEGDSRDGVFTCGACGYSAGEKTNTAGNVLKRGTGGRLVL

SEQ ID NO: 1524 - protein, 460 aa, synthetic construct
  REGION 1..460: note = Synthetic
KQETACRTVHQYNKEPIPGEDMKKLREIAEDYRRVKNYVYARYGGIGSLSKLYPGYTVQNEMTASGLRSELGLPSVYFYRAVFDALGDIKSQWAATKTKLAKLVGQNENFTAQEKHYLRFLLKSSNAFEAILNQKAIQLPQEMQRKYEELSHEVNTEKLHRYLCRQVRKYHQRELVTNRADGFYLTERAYRYGVDQADDAGRKPKYGIFIATKEKRRRVFIPLTDENSYQKQIYLKLIPEESGVDISIPLVIKVRMHRDYTNEIGLSAGMRCMFTTQDGTVYGEQFWEIQEELAQYLRASAETYRREKANNAGRRKYRAQKARLDAKLETYINQEINRMIEQEKPKVIYLPKLPGNSRAGYDRRVNYSVGVWRKGLIRERLEQKCLEHSIALVEVFGKAISSECSNCGSMGKYSGNDFRCGNCGFEADKKQNAARNALKRGQAGNYVNKIMESDEKAGTK

SEQ ID NO: 1525 - protein, 472 aa, synthetic construct
  REGION 1..472: note = Synthetic
DGRKICKSIHQYSKGKITSENMDVLMEIGHGCMVTKNYIYQRYGGIKSLGKLYSGYAIDAEVKAAGFREKIKLPSVYFTASVNRALGDIKIMWAQVRNGINEAANKNERFSPEDRHYIRFVLKVNGCFENILNGKTVSLPKEIQPRYESIIKELGDEKEQRVRTLNRYICRQTRKRLHRQHTDNETYFTIKKQGYRYGASDGEHGIFLATKVNRQRMFIPLTDTNAYDRMLDIKLNPQKRTIEIIIPLFVNTKQHEDYTNEIGISLGLWDMITTSTGNVYGSEFGKMQQEISQFILKENYQNGRENISGTHRYLVYKAKMDAALKNYVNREINRMLIQEKPRVIYMAKLPRNPGMHTAGHRDDQQFTKGTGDTHFLKIWKKGFVTERIQWKCQENDIHIVEVIGKGIGTECSMCGQKGYVKGKDFRCHVCGFEENKKINGAKNALNRGKTGKQLNEQFPQEKDVEIDKEVTE

SEQ ID NO: 1526 - protein, 460 aa, synthetic construct
  REGION 1..460: note = Synthetic
GGKKICKAIHQYSNGKIGREDMDRLLDIAQSCKVVCNYVYQKYGGIRSIDKIYPGYTVQNEMTASGLREKLNLPTVYFYPAVFNAVREIKTQWAHVKRNIYAAINENEKFTPEDKHYLRFAVKIDGCFVNILNGKPVLIPGEMMPKYESIVSDLQGDQSECVKSLNRYLCRQVRKKLRKIHTEKFLYFSVWEKGYRYGKSKNAEGRECHGIFLTTKERRKRIFIPLTDTNQYSGVLDIKLKPEKNSVEIIASVFTGIRTHEDYTNEIGISLGLWDMITTSTGHVYGGEFGKMQKALYDYSVNERRIYGRENSDAPRKKYSIRREKMEEALKNYINREINRMFAEEKTEKIYMAKLPQNPGGRAEAGQYLLRVWKKGYVTERLKWKCRQNAIEFIEVLGKSLSVECSVCGAVCETQSQSGYEDFKCPNCGYEEDRKVNAARNAINRGKTGRQLNKVFPAES

SEQ ID NO: 1527 - protein, 459 aa, synthetic construct
  REGION 1..459: note = Synthetic
TKEKVCRTIHQYNKESIAKEDMAQLKQIAKSYQIVKNYIYCRYGGIHSLSKITPGYEVQKELIAQGYREQINLPSVYFQNAIYDALGDIRGALEKCKKKILKSIYSNENMSEDDRHYLNYVLRVDQALFPILEHKNIVIPKKLEKSYIELSEKVDTNKLNNYLRRQYRKHSVKLHTEINTVFSVDYRGYRYENHGIYLASSVKMKRVFIPLTDTITTDRQIVVKLDIDNQSIELLVPINVAVKKHEDYVNEVGIAPGIETMLTTDNGNSYGIDYGKLQESYSIWLRETSRKRSLNTKENQGYKKYNANKHKQKEKIQNYINHEVKRLIETEKPKIIYIPKLPQNTRLVYGKNINYKLLTWQRSMIYDSIEKKCQQNAIELVWVLAEGTAKTCSRCGFKWDNTTKVRVKEKDNNKEKVSDIIKCPACGLEIHERQNTAINAKSRGQQKSGINKNLKRINT

SEQ ID NO: 1528 - protein, 432 aa, synthetic construct
  REGION 1..432: note = Synthetic
TKTVVKTAKQYNKYPISSEDMAVLQEIAEKYRKVKNYVYSRYGSSKYISELSPGYRLSKEMNDSDIRQQIGIPSKYFEKAKFDALADMKMNWTTIVNKIRTLAMNNENFNTADKHYINFILKNDRYLQAVINRDEEQLIEIAGKYYDKVVSKVDKHKLDNYINRQIRRNSKTLYTENNNYFVLKGDKYNYSDSGVRIPTFVPRQKIEIELTDSNKYSSQLTVKIFPEKNGIEIYAPIEVKVKEHSNYTNQIGIALGMYDMLTTSTGNVYGSDFEKYMNSYSEWLYKKKKSRPENAGREKLDAQSHRYEERLYSYINHSINLMLEKEKPSVIYLPKYPRHTVFGKNKKANFMTAMWKRKYICERIAQKCKENSIELIEVISTDIGVRCSKCGEANKEKAPDKYTCEKCGYTASGKLNAAQNAYFYGISGMYNK

SEQ ID NO: 1529 - protein, 443 aa, synthetic construct
  REGION 1..443: note = Synthetic
ADATIIKTICQHSRPLPADTMAFLRGIAEDYAKVRAATYERYGGIRSINHLTPVYNILSEMRSCGLRSQLDLPSAYYELAVMEAVTDIKSMWGTVKNKVREAISGRDRLTSEERKYLRTVLRIDTVFAAVLNRRNYEMPQNMEGISVETGRLNNLLCRLVRQCHMKPAVRKADYFRVTPAGYCYKDGGIYLVSRIKRRRVFLPLKDGQVSSHQICVRLGDGEANLYLYRESEAKDINGSGSVYAYIGYQDAVTLSNGHVYGAGLDRLVSPETERLNAKNQARSRAVRSRLDSLKAGDMAKAERIRASNLGKKKYDRQKQRARDRTQNFINAELNRLIEAEKPKRIVITKLIVKPRTRHYSPQANRRLARSFGSYIRRRLEEKCRLYGIEVVAINPKGTGSTCSACGSEGIREKQDFHCENCGYAATIAQNTARNIERMAKGTI

SEQ ID NO: 1530 - protein, 453 aa, synthetic construct
  REGION 1..453: note = Synthetic
TGSTMTKTVWQYSESLSEETMEFLRGIASDYCKVKNYVYKRYSGIGNLDRLTPVYSILNEMRHCGLREQLNLPAVYYELAIADAVTDIKSAWGITKNKAGERITANENLSADDRMYLRTVLKLNHVYAAILNHQEYEMPKNAKGLDIDVKRLNSLLCRLTRKYLLPPETDHADSFRISPNGYSYKDGAIRIVCRVPRKRISIPLKDDRVFDRQIQILIKENSIVLAVPIETRVRKHDDYINTVYVHIGYQDMFTLSNGNIYGQGLDELVSPETERLVRKNRERRRMYTAYVQSTETGDRKKADNIEANNFGRAKYDRQKEKSKLRTTDYINSEINRMLKTEKPGKVVITRPVTKNKTKYHTKSTNRKLSRSFRGYIRERLAYKCQINSIELIELNSNGTGSICSSCGAEGKRQGTEFFCERCGMKSTIPLNSAKNIQIKAKTQAENGYCYKNG

SEQ ID NO: 1531 - protein, 443 aa, synthetic construct
  REGION 1..443: note = Synthetic
YTKSIRQYSQKLPPDTMEFLRWLAGVYAKVKKTTYERYSGIGSLGKLTPGYTVLNEMRASGMRQELGMPVVYFELAILDALAAIKSRWGVLRDTLKRLAAFHEGFTREDRTYIYTILKWGSVYAAILQGKPYEEPKLVKDLPVDKHRLNNWLRRQTRKRLGKIQVTRENGFTVSPKAGYSYKNGIMRIAGQKPRKRVEIPLRDERRFNRQLHVELKEDYIILTAPVTKESSLPEGWTNEIYVHIGNVDALTLSNGHVYGERLNKLTDAETERLDRKNRLRSQHRDAAREAQTKGLVDKAAAISANNLGMMKYRRQKERNRARTEGFINAALNRMLSEEKPCRIVITHPVKVGKGGNLAKSAQRKLARSFRGFIRDRLQEKCEEYSIELVRIASKGTGLVCSACGEVGCTTAGGRFRCEHCGYEAAASLNGARNIERKYRSEHG

SEQ ID NO: 1532 - protein, 457 aa, synthetic construct
  REGION 1..457: note = Synthetic
ETKTVFRVVRQYSKPLSNETMDFLQGIATDYAKVKNYVLKRYSGINSIEKLYPGYTIQNEMNTTGFRQELNLPYPYYSQAMFDAIANIKSGWSNLKNKLVLLVRNNENLNDIERHYIFTVLKINKLYSAVLNRQEFECPKKFNETDIDFNRLHNLVRRLTRKHMIKHGKSTGNYFKAINKGYRYADGGIWLGTRVSNRRTLIPLTDTAKHTKPLTIMLLNNKIEILAPVESKVKTYNNNTEKTALYLGYLKMFTSSTGNDYGSQLGEMLSTRTERIYAKNKRRGKYHGLYRNAVKENKTKIANKIKSNNLGTIKFVNKNKSEMLGIKSYINAEINRMLQEEKPNEIVIPAKSPQFSTNMLKATKQKLARWVVGYIRKRLSDKCSLNSIKLTVVNAAYTSLICAVCGKPGKRMNQQLVCDDCGTRYDYPHNSAKNLLKKSNGKFKIPAEFDSNKFSSD

SEQ ID NO: 1533 - protein, 487 aa, synthetic construct
  REGION 1..487: note = Synthetic
MLKNIKQYSYDVNTDDFDELCSIAKDYNRARNYIYSRYSGIKSYNIIKKSRKNIRDVWTKSGKIDEWNINSRYIRNAIEVCAANIKTSWTQTLDDVREHINKNEKDDRVSHFMYTILKYDNYLFKVLNKEDVVIKHFDDISNNKKKKIYSKIRRLIRDNKPTISKARSLSMQLDEAMYSYENGYIKIMSNTKNKRLCFKVNTNYRFKGNICLKIMHDRIVISRAIDIETKPIEYEQNIIAIDRNKINMFDTNNAHSYGEWFGELSDVHSDLLYEVNKKRQPYHSKIKELENKENKTEKDIQKINNIKKFNLGKVKYDKRKNRFDENMRKYINSTIKDLINKENPKEIVVERLDFTVPNKNKSKKKRFSKKTNRKLSSWAKGIVIDRLKYNTELNEIKLTEVNAAYTSQECPFCHHLGEKRNDIFYCPNRQCEANVGVHSGHMAAKVILQRSSDKEITLKTKHKDVKKILLKRLEEIKKPIQPRPNDT

SEQ ID NO: 1534 - protein, 514 aa, synthetic construct
  REGION 1..514: note = Synthetic
PIKSYSKTVRAYSLKLDEDTYTKLDQLFINYGKCRNMFLNQYCGISHMLDVKQYRKLRDQIKGSKQNKKYVAKYNFLDKHWCYALSDACANINSMWSNLANQIRRVVQANEAIDKDERHLIYYLLSIRELWYYALTNNQAVLLDLSHGLQKHLAELEEAVTPKQRKHAYSYLSRLTRRYKYTPRKHHSLNKSMTYDESMYKFTGNQLEELAISSPVSRKRFSLKLTSPWHYRLNGNLQIILDRDKKRLEIHKVIKVRQKKEYQAGTKLGIDKGLATLVSCSSGREYGKGFSQFTRPEIEQESQYLARRNPYYGYRYQLKKKLNQLKNANIPKQIIKKKQLTRQLNKLNANNIGHKRKDKRHASYHACLESKINHAIKTMIKLETPSLIVKEDLTFTKEKIAKKGSKYERQVRRNLSSWTKGILNERLEYYCQQYGIDFKDVNPAYTSQYCPNCGRHFIVRFGKHNEKTLCPNCGEMDCNIAASKNILARATDKEITLYKPYKKVKAILDQRIAS

SEQ ID NO: 1535 - protein, 469 aa, synthetic construct
  REGION 1..469: note = Synthetic
LPKTIKAYSVKLDDETFNALDKLFISYGKCRSRFFNELCGINHMTLNFREQRNLIRQKKISAKLVKQYDFLGKHWTYALFETCSNLNSMWSNLRSKLKAVIRDNDRLNEQERHLLFFVLSFRELWQGALKYDKQAVYALPKKYQKSYFKVLDEVKPERQKAVFSYLRRITRRYKPKPRKSGKHNKSMTYDENMYRFTDLSTIRISSNKPRKVYVIKLTSDWHYDQKGNLVLVLDRTKKRLEFHKLIQTRTHALKYQTPIGIDKGESTLLSCSTGNEYGILFGNKLNEEVERLCEVNKKRNRARSKGNATGNKRYLKAKKRHRAYLDSQISHAVYTMLLTEKPSLIVKEDLTFTKTKVKSKDKSKAKIHRYLSSWLKGELNDRIEYLCQKYGIGFEDVNPAYTSQYCPNCGHKFLTRYGKHHSLTLCKNCGEMNANISASKNILKRKDDKEINLYTPYKKVQEILEQRAI

SEQ ID NO: 1536 - protein, 513 aa, synthetic construct
  REGION 1..513: note = Synthetic
TQPKTIRVYSKKLSDEEFARMSDFFERYGRCRHFFLNRYCGINSMLAVNNWQALRNQVRKWDKPVKGSKGKLETVYNFQTKHWVGALREACANIKSMWSNLANRLKKLIQGNENFSADQRHLLFFILKLKSAWQAVLLHKPIELPEEYTGALTEIEAKLTDKQIKQAHSYLRRITYRYHYRARKSGKLGSSMKCDLNWAFEGNTFSFSSDVPRKQFSVEMTSPWSYPRTGDITVVLDRIKQRLEVHKLISSKRYSNDSKKAIGIDKGLVTLLSCSSGNEYGENFSKLANAIVDKYGKRNANRQPYMSLRWQLNQQLEQLEKANQPLSKTALRKKIKLLGKLKNLEQNNIGRKSYDKSYRSAHETVRSFINCAINRMIETEHPAVIAKEDLTFVKEKGVKSDNSRFARKMRKRLNSWTKGQLDERIEYLSSKNSIETHDINPAYTSQYCPICGQHFEERYGSHHELTKCKKCGEMNANIAAAKNILSRLTDEEITLYTPYKRVKEILDSRIKEA

SEQ ID NO: 1537 - protein, 566 aa, synthetic construct
  REGION 1..566: note = Synthetic
TKRTQTKTIRAYTAKLTDEEIKELDELFAGYGRCKDFLYAQLCGINHMTDVKQWHGPRDRIRKHDGEIKKARKAVKDWKKAYKKNKAQGLKSPDAKTVRLSKQKLLNEQFGIQGRHATEAVKDVCMNLNSMWSNLGLKLKKQVQANEILASAERQYLNYVFTSPYYWQLILQGRENEAKPNEEDSQYPSLRASLTKEQLRHCAGYIRRLTRKHKPYPHSSSARCMLCDEIMWSVVEKDGSSYLEIMTAKRGKKKQFKLTGPYCYANKKKRGDIQLILDKNKKRLEVHRAIKSVVSNKRNLHKKLGIDKGMATLISCSSGQEYGANFSKLVSAEAERINRRNTNRNKYIQPAKELRRQRSNLQKKLAGTGTHSAKTNKRIRCQIGSIERQIAHLEKHHLGNKLYRRQHERKQNNMERMMNVSIRQMLITEEPDVLVKEDLSFTKEKLPRASSRYEAKARRKLSSWAKGTLNKRLEYLCASQGIKTVDVNPAYTSQFCPRCGAHFTERKGMHHETAVCPNCGEMNANTAAAVNILRRMDDKEITLYTPYRKVEKILEDRYANKQAVMA

SEQ ID NO: 1538 - protein, 475 aa, synthetic construct
  REGION 1..475: note = Synthetic
MKVPDSGTVRLARQKLLNEQFHIQGRHVTEAVKEVCMNLNSMWTNLGLKLKKIVQANESLAKEERQYLNYVFTASYYWQLILQGRENEAESSKESKYPVLRAALTKDQLRHCFGYIRRLTRKHKPYPHSSAARCMLYDEIMWKVIQKDGADHLDIMTAVSGKRKQLKLTGPFCYANKKKRGDVQLILDRDKKRLEVHRAIKAAVHDLHKSKKKKVGMDKGLATLLSCSSGHEYGFNFSQLVNAEVERINRRNTNRNEYIQAAKELRHELSALQAKLAIKHSAKTERRLRNRIGSLERRISRLEERHLGSKLYHRQHARKQCNMERIMNMSIRKMLLTEKPDVLVKEDLSFTKEKLPKAANRYEAKVRRKLSSWSKGTLDDRIEYLCDCLGIRTVDVNPAYTSQFCPNCGARFSERKGTHHELTVCPNCGEMNANTAAAVNILRRADDKNITLYTPYKKVEKILEDRYANKQSVMA

SEQ ID NO: 1539 - protein, 523 aa, synthetic construct
  REGION 1..523: note = Synthetic
KKNCVEKCIKVETVQLNEEEYAILDEMFERYRQCKDMFLKRLCGIGSILNIQSFQNVRNMIRKEQNALPNEYGNKSYCDIFEIQGRFWVMALSDTCMTLKSMWTNLGNKCKAKLRDNHTDLSKPERTYCNYILSSPKILYCILNECEYTGSKSKNYRRILDDIKDVPEIRIKYIHSMLRRLVRDNKPYPEAKKADCILMDEVMYKITSEKDADYILLMTNSKGTKLKLKLKSRFCYNKKGNTQIVFNREKRTLSIHKCIKARQSETKKGHPVGIDKGYATLISCNDGNGKKPEYGENFGKLISAESERINKKNTNRNYFYDKCRKLQDKLNQSEDKSERELLRELISKTKQCHLGKKKYNKKHTRAMKHMESVTNHNIRMFMNEMEPSEIVLEDLSFVTDRKKPRTKSYNRKMSSWQKGILDERLVYIAKIFGAETIHVNAAYTSQYCCICGSKLGLRYGKHSGLAECEICGTVNANTNAAGNILARKTDRKIMQYTPYKEVKAICDKRAEALNAAVEHADIW

SEQ ID NO: 1540 - protein, 515 aa, synthetic construct
  REGION 1..515: note = Synthetic
LEKCVKLESVELNCFQIKDIENTLNAYLKCKNYFYDLLYGDQYMVKVQNASKLRTELSKNQKAKGISYQDLFHIPQRYWVMPLFDVCSNLNSNWSNLANKLKKTRVQHNKNFTDEERIYCYVIFSDRQMWYNVLHWITIKNKYLDSLNISDKRKKSLNNYIRRITKENMFIKPHSDENRCMWLDMNMYSYSDKFDYTKLFLSTLKKGSMLEIKLKGKVKFPRSGNLQVVYKKDKKVIELHKTIKTRTSDKKHKDKKGIDKGYANLFSCSDENEYGMNMGIFFTENAEWLNKKTYSRNFYIDLCKKIEKEKQILVDRKNKTTSVKEQQFLSKRIHILDKKIMNIKTNNLGNKKFNKAYGRRKEYCAQRMNHEIIRFFTEHDLKILGVEDLTFVNYMAPYKGRKFNRKMSYWLKGLLENRLEYIAKRNGCEIVKVNAAHTSKFCAKCCAKLEGRTGKHNEIAICPNCGELNANTNSAKLVEDRIDDKEITLYTPHDKVKEIMEQRYLNNKKKNKNLK

SEQ ID NO: 1541 - protein, 513 aa, synthetic construct
  REGION 1..513: note = Synthetic
MSNAVPKDVKYHSDTLDKQVFAQLIETCDSREGCRNYFYSRFSGIEYMDNLKFRDIRDYLLANEKDEMKKFHVPSRTWKMELSETITNIKSMWSNTANKIKTYIRDNENLSDEDRHYLYYILKSNELWAQTLKTQTVNETRKLAAIQVSSDKKYLLKLLCRYTRKAKPKISHSTELKSMQLDTQMYSLEHGHLSIQTNKSRKRVHVDLKTKVFLTHGNIRIVLDKQNKRLTVHRCIYIPPNTTLITIKNELGFDKGYTVMLSCSSEREYGECLGDLLSSASKFVNEKNKKRNQYHSELRKLKKKLENKHLTNKERNAINEKIAHIKQINLSNKSYNRKRNRDKEIIRSYVNHEIKRMILTEKPSTIALEDLTFQSDSPKDKGKNFNRKMSTWIKGYIDERINYYAQLYDIKIVYVSAAYTSQFCAKCGARLEKRIGEHHEIGLCPNCGYINANTNAAKQVESRIHDKEITRYTNYKKVEQIMIDRYNKKLKKQQKSKKLKKKTSKKTTTATSC

SEQ ID NO: 1542 - protein, 437 aa, synthetic construct
  REGION 1..437: note = Synthetic
IAIIRNAKCWGIYFTEEFLDDYKRTISINNKVTSRLRRGLTSGEIEEIVAWDIISPNGNKKNVKKKDGTYNHGGRSYYTAADYVKLLDTEGIFEGALKGRQSFKRMILYYCMERFRGYKTRNNGKKMPNIGIKENKSLYYKESNLITVDTENNKLTVKTLFDEHDLTYKYNLKMEHIKPKGKAVKITTGGNFCMKQRAFVGQVKFNKPTIYEPTSVLSFDLNKKASDWIVFNDGEKIVRQGIIEELCKEIKQLNTLLDPDKKKPVAERKIRTRKRSKVRRQVQEKHKKQSSLINPIADYICQKAVAKNGLLCIDSVKTGQSNGTFGQDKLIPALVTKCENMGIPFYEVPCAYTSRRCMNCGSIEKKNRKSTSEFECIDCGHKCDAQKNGADNIAYHGDRMYNAGVPYGNWAGKKKATGDKGPRKHSVDDLVKIYSQQ

SEQ ID NO: 1543 - protein, 454 aa, synthetic construct
  REGION 1..454: note = Synthetic
ESYTRNAKFWGIEETPEFQEACVRYTKILNNISNHLKQELKSGEVEYLNTSSLSVDDEQPGLIKFKDGRVFTDSFYINEITHLFDGVDVLQKGIKTMARSMLQYVCNRFGGYANRNGESKIPTITFKGKDFQLKDKQLRFENGKIKMKTIFGTYELEYSNSIKEDELFAFLEQEGKRWTGGNYIKKQNCIVTQVRIPFEPIYDPQGVLGTDFNKSTNDRIVLSNGYKIAATDRQLELERQIKEVNKILKEKDGPVKNRTMNSKKRRTLRKKQKSLHAELLNAYRESVQEVVDIAKNNQLLLCIDTVKTGQKMGTWGQDKIIPLMITICENSGIPFYAVPCANTSKRCPHCGYIPKEKGQNKNRPSTNEFKCQECSYEEDAQLVGALNIAHFGKEMYHNHVPYSSWGRRSVAKLIEKYKQLEQRQFYSPRQSQVSGFLSERSEYPKSNLSTVKLS

SEQ ID NO: 1544 - protein, 410 aa, synthetic construct
  REGION 1..410: note = Synthetic
MIRNAKFWGLEYSAEFSEMLTLTNSLLNEISECVRDEISNGSIVNINSVGLGQYVELSDGKEVTQAGYRDRIRYILDKYPIVERRKGIERQLVGYVLERFAGYFKRNGEKIPRITFKNKSLYNKDRNVEIDKENKRLIFHTVFGDYNVPYKGSIKSDYIDSGKFGGNLIVKQKCFVVAVDIPFVQQYTPEKVLGFDINKSLHNWIVFNTGDVIPAPDVVSDLIDKIRKLNKTINNSKKEGLRTSQRGAVRRQVINKHKQLHAEIKKVCEKIVDVVKDNKSLLCIDMVKTGQSMGTFGQDKIIPELQTLCENQGVPFIAVPCKNTSRRCSSCGYVHKDNRKTVDEFRCLKCGHEELSHLNAAKNIAFLGNKMFEAGVPCGNHGRISVEKLIERHGSHQHPTQHVMTFMAAS

SEQ ID NO: 1545 - protein, 413 aa, synthetic construct
  REGION 1..413: note = Synthetic
IIYKRNAKFWGIEFTAEFGCALKRTNSTLNRISRYVRKSIKSGDITNVTKLGYVSLRDGVMIDGELKHELTKAQFKNSIQHIFDADSTNESLKRECVLYVLERYAGYFTRNGQGKVPNISFKGKGLYYKDNFVAIDQKAKYITLPTIYGVFKLRYNCSLKEEFVTKPKFGGHLIVRQKAFVVAVDVPFVLKYEVASTLSFDLNKTAEDNVVCNDGEIIPSSALMVDLVKKIKKINESLDGDKKLPVSQRKLRSKQRRPLRLEWKRLHKQLKNECRKVALRLVEKAEESKSLMCIDSVKTGQTMGTFGQDHIIPELQKECENRGIPFYVVPCRNTSRRCPECGHIHADNRKDTKTFKCVSCGHEADAQLNAAINIAHIGQMLYDGGVPYGNYAKRNVEKLISSYQKESIPVSSE

SEQ ID NO: 1546 - protein, 419 aa, synthetic construct
  REGION 1..419: note = Synthetic
IKVKRNAKLIGLDTREIDEDHKRTIQLCRRVSKYIRKEIVDGNIVEINKRVIYKDGTSLDNTAFKNKVSHLFDDDAHSESLRRNSVIYVMERYAGYISRNGLDRFLKIKSPISIKDTSFYFKDNFNKIDKENKILYVKTMFTGDREYRKVPYKYVLKGDKISEDKKHGGNLTFPRKKNKAKTYVIAVDYEREPAYEPEKLIGFDLNKDKKSWIVLDDGQRITPNQQIQDSTENIRVLNTTLDKDKKAPIDKRSLRSKDRRPIRLKWKKAHSKLKAEISKVAETVVNKARDEKALLCIDSVTTGQKNGTFGQDHLIETLQVMCENQGVPFYVVPCKNTSRRCSSCGYIAKGNRVNTDEFHCEDCGHKCDAQNNGAKNIVFQGQRMYNAGVPYGNYRRRAVDTLVKEYSQQESSVDTSEAS

SEQ ID NO: 1547 - protein, 416 aa, synthetic construct
  REGION 1..416: note = Synthetic
IKFKRNAKFWGLDLSELEEDFKKELETQRRISKHVRNMIRNGEITWITSDKDLILADGTKQTKAKFKDSISYLFDEDACSESMKRNCVITVLHSYRGYWQRNKDRILDIKCPIGFKYKSFRFNEAAIKVDKENKVLLVKTMYMPTGKFRKVPYKYSLKEDLITKKEFGGNISFTQKCFVAGINVEVNEYVSNDILAFDINKDSKSWIYFNDGTVITKPETLIKLEKEIKEINHSLDKDKKVPIKKRELRSKQRRKLRLQIQKKHQKANRIVFKICKDILSTVIKNKQLLCIDGVSIATAGTFGQDKIIPNLRTMCENQGVPFYVTPTTNTSRRCALCGHIHKNNRKTADEFHCIECGHQDNAQLNAAHNIAHTGKRFLDVGVPFGSWDHRNADKLVEEYTVGDKAENSEEMAIDFE

SEQ ID NO: 1548 - protein, 401 aa, synthetic construct
  REGION 1..401: note = Synthetic
IVKTRGIKFLSLDTKKIEEEINIITRVCNDFSKQIRKDMKSGHITKVTSFGFKDSDKNTITFKEYRDKHKHIFNSIGWTKPLNGYERDLVGYVGRRYKGFFKRNRTKKMPTIKFSQKGIHVKDRFVKVKDDHILFPCHNQEKGSQPELKVPFGKCTNFNSLNELDLKKGVGGNLSLEQKFFMCTTVNEVDPLYKFESTISFDINKDKDYWISFEDGEIVCMPDDVADELENLRLLNEILTNKKRHESLLKSSQRRHYRRRWRNKHKKVEKMIEPYVMKIVDKAIENKSLVCIDNVSTGHKNGSFGQDKIISILQKKCEDLNIPFYGVPTFFTSQMCNNCGHCDEGNRDGNDFECLSCAHTDVSHLNAAKNIRDRALLFYENKVPFSMYKDSEENVLKKYGS

SEQ ID NO: 1549 - protein, 470 aa, synthetic construct
  REGION 1..470: note = Synthetic
IYKRRGVTIILDNKCDEFKKIIEEKEKYRACCQEVFNKIRQLMISGQLEKRLYGSFCDICIVQDSEVYIENINDIVTKDEMVRGNFAGILNTVTTAKLVKGMFKETFEKYGFVDKGISNYKRSIVKHALDRIDGFLTRNKKSKKVKKNGGLPHVNFHGKVIHIAEGLNYNDEEKTLSIPYSGGKLTIPVHRYIGKGMVKKNFGGNFIFKYDKNKNIYAIVVKAAIEIFSEPIYDPVGFIGFDINETPTDWIVYDDGSKTARPPEMSAKIRENRILNYEISNTNKKAEIKLQDGTVRVLRTKERRKRRLKQQDVLKDIQKMTRPFAEDVVNKAIKSNMGIAIDKINPGANSNGEFGQYISEYIISLCEDKNVPFYVCPSAYTSRRCVCGNEDKKNRNGDNFKCVECGYEQNSHVHAAQNMVRIAEDLYEKETMYFGSKSKSVNHLIKTSDDLWKRYNGERLKRPEEELEDQ

SEQ ID NO: 1550 - protein, 411 aa, synthetic construct
  REGION 1..411: note = Synthetic
IKVKRNAKMIGIDMRTLREPYNVWRNTCTRLSAWMNDAIKNNNLDLKSYGAGYKFDYKIDKKYWTDKRDSDKVDDDQCTSAELVKYLSAETDVFCECDPKTSTQRRDVLNYVAERYYGYKKRNGSKKIPHPTFHEDIAWYFKEQFLTINSKKKTLKIKTLKGYVDTTYKYGLKDELLHEKNKGGNLRVKTKEFVAAVAFDNDVLYHPKGVIGFDINFQKGCWLTMNDGSEISMPDNLYELVQKQKELNTKIADRTKPVKERKIKSKERKRLRVLKDKITKQMNKIIRSVADKILDDAIENKYLLAIDGMAPQGCWGQDKLIAYLQTQCENKGVPFYIIPAAYTSRTCSVCGFESKKNRKKTDEFKCQECGFECSAHFNAAVNIANKAQSLLDDGMPYGKPPRFIKQKTVTV

SEQ ID NO: 1551 - protein, 490 aa, synthetic construct
  REGION 1..490: note = Synthetic
IFLRKAVKFIDSDNALDSLRELARGIVNEVNSKVIEMVASGEIVSIDGPYNDVVVKEITKFGEELEKKFTASNFIDRFFPHLAKMAKENKNKSHIRSIVTGVLRKWKGHYEKHGEFPSTIAMKSYNLVMGDGFFSFDGKIKNGWLVAKNLDGSELKIKYRTKSRCERIQKNALKYLNLMDPNSKFGATVIFPRKKGGKNVIVASVEVPYQFSYRPQRFIGLDFNKANENWIYFSEPIDGVEKIDKNLLEGVLIAEAELKKANKNAKVHSSIQDRIDEDGTPIRTGKRSYWRKHVKLVHKLHKRVIAAAPFPGKETKLIDTLVSYVKDNSLGLAIDSVTTGKSNGSFGQDKLKELLQDACLEQGVPFMVVPTFFTSRRCTSCGCVNTPDCRDRKTNIFTCSECDYSENADLAGAKNQAEYATCLTKLNFWNGTLIDKWIKIKNEGNILHSPQDKAGNVSRPEEETKQTQTPLIEEKSESETTQQNDESDQN

SEQ ID NO: 1552 - protein, 450 aa, synthetic construct
  REGION 1..450: note = Synthetic
INVKKAIKLIIADKNGLSNLRKQTHPLMIQINERISSLIRDNILININGSFNDVYIHREALPDGEKLTTSNFMKEFMSDIFSPYEKSKVTTQLRMFTAGQLRKYKGYKKRNKGKLPNFIAVRSDNLVMGDGFFEFYKNKINGKLKVKNLDGTKSIVRYRKSSKCKGIQNNALKYIEHVNVEKKFGGTIVFGKEGKPDRIVASVDVPVEFDYYPKGFIGLDFNKSNENWIYFSEDVFGQEKISKKSYPVISALEKHIESLNKIVKVHKKISEREVRSKQRTPVRLEIQKLHEKHMNLIETSRFPGKERGIIDSILDYAVSKSYGLAIDTVAMGEELGTFGQDKLKQLFVDKCIERKVPYILAPSYYTSRRCIHCGWLDLSKANSSRDKKTNTFTCEHCNKAENADRTGAKNHVVYAKYLADIDFWTFDKSKQWAKIKESENIFHSSQINGR

SEQ ID NO: 1553 - protein, 462 aa, synthetic construct
  REGION 1..462: note = Synthetic
IFSRKAVKFIVPFNEDITTLQEKGRGFYKAVNKKVARMINDGKIIDIGNRNKVLVQYEWGAEWKTEAQFMNEFLIEEEKPFEGLKLRKHTRTIYQGVVRKYNGKRTRDDKKKEKPLRETTSFIAPRTLNLVWSDNFFKFVDGDVNGNIEFKSLTGKKVQVPYKKTSKKGRIEKNAIKFLPYMKPDETWGATMIFSKDLKRCTIVASAEVPVTFKYEPEGFIGVDINMSEVFDNWLYFSEPIFGLSKIPKSQYVDTIIKTEKALEELNKQTKIQRLIKDRPIRSRERGKLRWKVKWNHRLHEKYIENAIFPGTEMTCVDALCTYAEQNKKGIAIDSVKSGNQNGTFGQDKIPNALIAECEKRGIPYILTPTPYTSRRCIDCGHVEAEYYANKGIKPNKARDSKTNIFTCRGCGSSHDADFVGATNLAVWAEFLVSVDQWQGDLMKDKWALIKRSFLFKDVKFP

SEQ ID NO: 1554 - protein, 470 aa, synthetic construct
  REGION 1..470: note = Synthetic
YKEISNVKFRYKNSDEMKKFEEQIMSLARQTAKLIGKKVREGIIPEKVHLIDLEGDKVLNFKGKPTAKLSLEKGSAYIHVEDYTDIDDYKDKRLKPASLRDDPEWFGEIFKDVKNKSMGLSITEGVINRYASYQKRNKKLPPYVELKKQAFNIRKNTFSLDLNKMQIIFNGLDGNKIYLDIDVEKSVLFKLEDFKKKLESKKEKPKKSKSREEIIKSATFGANVNFEQNLIIATTECEKTLAYEPEGFFGPDINKENQYWLTYPVNLPCAENPNGSFYLSKPEEIQEIENELGKVNDLINQTFKPKGEERSVTFIEFKGKKRKCNSQTRRTLRRYWQELHKKQMKLIRKISQIEKVFKFCETNKLGYAHDNITTGQKNGSFSQDKIKRLVEERQRRTGIPVVYTRPAFTSQTCPKCNKKSEKNRIGDKFKCVDCGYENVSHVVGAENICRFAEKQFIENANNEKGVRVPH

SEQ ID NO: 1555 - protein, 433 aa, synthetic construct
  REGION 1..433: note = Synthetic
YQRVSNIKLRYVALGENKILMENFEKELMLKVRQTAKILGQKCRLGIVHKMCNQSGYIWTPQNEKITPTYMRDSEDWFKEIWADCENKGLPTILIEQVINRYQSYKKRNKKLPNYVEFKKNTINIKKNYLRYCDCENAVFIRDLHNNVIKLNIEDKRSVLVHKDLWLKKLSAKKTKPSSELKSVTFAANVMFGCRQIIPIVQIQEMEAYRAKGFFAIDINKSAKDWLTFNMPIDGKMVYEKPEVIIAAESRIKKIEKAINDTLDIMPDKRRGKGVKVDHPDFEGKVFKCTSDGRRRLRLYWKDAHKKLQKAINKLDILKRIEKFCFDNKLGFAHDDVASGQQNGTFSQDKLKIYWVSRASEAKFPLEIVNPAYTSQQCPECGHRSPKNRVKDDFKCLNCDYENESHKVGAINIANKAIKAYSNKERVCAPISE

SEQ ID NO: 1556 - protein, 421 aa, synthetic construct
  REGION 1..421: note = Synthetic
YIGNNKFRFKPTKEFKGLQAQALKMYQQVSKTIGQKIRAEEIVWEKPKTKKSMPFRSGLCKGYINLPDGTTVKPAEMRDSESWFKHIFENCTNKTLCGKVIENVCDRYASYCQRNSKLPNYIQIQKLNFNFKEGVCYNINNNTLQFTDFNKNKITLKIKDKTSVLNNKQLWLDQNDHKIKTSKNELKTGGVFIDKHNLFVVTVKKSYENTFDPKGFVAADINMARGDWLTFSHEINGEKTYPMPEYIIEQNKLINDIQGEINKSLKDHEPNKRAENNATTGFRKKKRLEWKKEHKNFEKAIRKHFVENIFPPIIQFCKDNKMGYAHDNIATGSKTGTFGQEKIKKIVFEICEENKIPIIKVNPRFTSQKCVECDYRHKDNRNGDKFCCIKCGFTSNVHEMAAVNISNKGIDDYMTKGYSHF

SEQ ID NO: 1557 - protein, 531 aa, synthetic construct
  REGION 1..531: note = Synthetic
VKLVTNIKLEIVEPSEEFSEMISTLSKLTNTSSKILFEFIKLNKDKVSSINPQGNIMLKRKEDDWVLALDGEKIPFEYSKTDDDKANPKIKNTTFRDKELSGIFREAGVANPSYGLQILENAANRYSGYGSRNADTKKGKIPKSFISFRDKGSFNLGRCGFVNLVWSNSGDVHTVRVKNPKSEGAKVKANPIEVKVRFSPTPDLEKKIKEFKDSFGVEVDKKTGKEITKFQANFSKKKNNSFVILLANYRKELAYEPVGTLGVDLNLDKEQWITTSAPIFGGSYHYPMPSHISKIIKEIDEVNSKINRSLEVSSKFRRIKGNVPHDNKNHSIESFGIVHKQRRRLRNRCVGENGLHAKLKDAIFQDRGVNLIKNYLIKNNLGLAMDMVQTGATTGTFGHDKVQEFFEMLLRTQGIPVKNTPAYYTSQRCSKCEHTEEKNRDHKAEEPQFECQKCGEVMNSGVNAAENIAQAALVMFEHDMYYVNKKKKDCRYGEDGKFYDIRNGKDNKIPFSINYIQELKKEKSACKNTNQ

SEQ ID NO: 1558 - protein, 491 aa, synthetic construct
  REGION 1..491: note = Synthetic
ISYKRICSIKLSVLESEEFGDYRKLIKKFAGEISKEMFKMTQTGFFQDYKSYKFYCEAPESAGGEYHYTGRGDKKKLKYPVPVKRLTQGEFEKLPAISKVINKYFPEGSDAQKGYITGFIDQVARRYEGCMERNTKMPSRKIDPLRASIDFNKEQVNVNVDSGEVKIRSVFGKGKNTFYFDLVTNLNESFIGHLEDFKHEFADKYNAKTGFYEKLNATYIYRKGNRRELMFKITEYRNLEKADIFLGIDLNKNLENFIALSREVGGKKIYSKFIELTACEEKIRELENEVKDTIAAPNAEKIKGSSKRAKRTRLRRQVHSWQAKQLNIARAAVTELLNKFRNENSDKRIGIAIDTNTTGSKLGTYSHDVVRRALKEYADSEGVVYYEIPTAYTTMHHPECGAFDPKARGRVPEKFMHLKGDAKAYIETKYKNMYVCECGYEEHADIHAAKNIEIRAGVLQDLNVQMNNTWSGKVKIEYLSRLKEAGYSPNK

SEQ ID NO: 1559 - protein, 461 aa, synthetic construct
  REGION 1..461: note = Synthetic
LIKTEAVRLKLEMPEPTMRYCRKILNFMRDGTKMMDKLFRDGRVTKYGGYNFKFADNTPDLYGTDAQIEKGRLSDGEMRKMPEYEKLIEQHWGKDIQKSLIAGAITKMGELEMAYIERNTDSRTGEINWPNNAIQIREKSIQTKAKAFSFDKNGEAYITGFGNKKDREKYPLGVVGDHYGNFNLLPRGKRGITCPTGGVLSLKNRELILTRDRILEIPKVELWLGTDFNKSPMNWAVFSRETKYGKIIAKTPELKIIETQMRLLQKEASDHDKYNSNQRSGLRKKQDKAHEQQKRIVRDLTSEILQDFYDKNGAFGLGIDSVRTGQKNGSFAHEKFQKEMAFWMTREGLPFYHVATPYTSRRCPECGTVCAYNSAMDNYTNKEKTARNHKTNRYTCHNKDCDVSTEEGALHGDMVGALNNEAYCEWLQDASYEMVNTTSRSYNINQWRILKAILEPDFYYG

SEQ ID NO: 1560 - protein, 455 aa, synthetic construct
  REGION 1..455: note = Synthetic
IKSNEKSAIRLNITLSQQHQAYFKHSRDFQRKMSEKVYSMLKAKEIIEIQAHSLIIPEQVSLTNGATSGEEKKKVSGVLTFTGRHSLGDRQLKYLPEIKEIIEEFFTEDYLKSHVDALLWEVCRRYKSYIGRNNKLPKSSIKIRDKSMAYKSDIFRLNVETKEVLIKKMTKDKNEPDVLVPYDAEDFYLEKIGLLGFGKSKKLEHLTEAKGGIISFKKNELVLVADKVVTYDKVKTWVGIDINKSPDNWLYFSKKIDGKYNFPKPKDILEIEEYIRSTQKKISKDRSIKSKQRSGLRKKWNKAHARHQKMISDFIFEKLEKLKTSSKSSVGIGIDTVGTGQKNGTFGQDKVIVAAQKFCRANGMAHYFVPTPFTSQRCNKCGNVSKQALRKLIKDKYICVKCSHKCHADLNAARNIAAFAKVLQDSDFEMTGTLNLDYKVKSWEILNDKFKLKKK

SEQ ID NO: 1561 - protein, 429 aa, synthetic construct
  REGION 1..429: note = Synthetic
IISDESMAVKFKIEITSQQEEYFKNCFSYMREISFWLHEKIKDRQISKLSSFSLVFSNGDEVSDRQFKYLPEIKQIIEKYFGSEVYGANIDAINWSVVRMYKSYIGRNSKKMKNAISIRPKSFATKANVFQFDKENNVLLMQKVEKDKSESHLSFNITECTYSNSNLLSFTRKKFPNKSNPQGGILCLKNNQLVLLAKMEVEYPIAEKTIGIDINKSNDNWLAWSEKIPSTGEKRLPKPTNVFEIEQNIKALQKKITGKDESDILNSRKRKGVRKKWTKAHNKHAMQVELIVNKILDEFKDVYGEFNVGIDTVATTHGSFGNDKVIAAIANWCKANKRAYIYVPTPNTSRRCSECGQVSRSARQLNIYTCKTCSHVEQADENAAKNIELFADAIIGNGFRMIGTLKSSYKWSLMRFLNDFFKLKDNVTA

SEQ ID NO: 1562 - protein, 438 aa, synthetic construct
  REGION 1..438: note = Synthetic
VKKTACVKLKIKDNPEFVKYMPSVFDLMQKISSAVHSEILNISDIGPFTLKWKDKVYKDSGEFRELPFIKPVLDDFFKDHDNIGFSALRAIYWSVVRMYRSYVGRNKKNMPLPIRVNTNAVALKDATFKIKEDGSQIIMSTMFDRKVKIKLEVDDKKSFIKNLKYINFNDKGFKQNAGGIINMRTNHLVLTTDDAYFECQDVDSFIGVDINMNLKNFLTWSDGDIISRPKEIQDLLDKLKKHNELLGKKNRGLITGNSRTKINKAKNRMHKRYLPKAMRKWLYPILDKKLKKGIALALDTVTTGATNGSFGQEHVIACCKRYCEENGVFVYEIPTPYTSQMCNECNFAAKENRNGDKFKCIECGHEDHSDVNAAKNIKAYADYLYSINFQSHIGGDSKYNRSKIAKIKNHFADKHGNKTWKRNPLNNNPPPLILRVKS

SEQ ID NO: 1563 - protein, 438 aa, synthetic construct
  REGION 1..438: note = Synthetic
MSCTAAIKLGLNINKQKKQQIEDHFSQFLDFQNKVSQKIHQLLKDGSISSIENFSIIYLGEKVTDSKVRELDWMQQILSDVGIDKNKVNKSALRSLYWEVFRRYTSYIQRNKQLSVNKNLPAKPIDIRPKAINLKEKLVKVYDSLDKISFLSIEKKGPDLDVQIDISKSFTNNHKFLDFNKKGEKITGGIFNFRKSELVITVDKTIEVQKPENMIGFDINQSGKNFLVFSDKVNGENFFPKPETVSKMEKTLKQINKAIKDKSSNINSAKRRKLRLIWKKQHKKLEREIAKFLIPILESIDFSKTGLAIDTVATGATAGSYGQDKVISLCTDYCKKNKIFYYLIPTPYTSQRCSSCGKIDKTQRNKEKYKCTCGHQGHADFNAAKNIKEFGEHLVSIDHPLFASMNKNHKISTLKVLKEKYNFNRNPLVESPISFVVG

SEQ ID NO: 1564 - protein, 470 aa, synthetic construct
  REGION 1..470: note = Synthetic
FICPMGIKLTGVEATPEFMENLKIESKMLIKFSKLFESWVKDGLVKEISGNYVHFNQPIWDAKYPESKKPEKLDTHILSLRHVRLQPEVKKIINSTLTESQLKNLDLSLLGAKLWYVVERYKSYVNRNSKGKAKKFPKKGIELKTNKAVYFKEKGLKIDHENNLVIVKTLEKKKYMKLPFESSILDRAKLLDSKWKGGNIVLNSLDLEPDNLTVFQEKIHSFHKLPSVFIGIDVNRTCERWIACTEPFKNGKKTIEKPQSIQELEVKRDEYNRKLRPSKKDKVEYKLNSEQKRKMYGRNQKVERHRKMICQSYLEPELDLFKDTHGENFVMCIDGVATGRDTNSFGQEHVRDVIANWCKKNNILCIIVPPQYTSQRCPKCGEFHKQNRTNSNNYFCPSCGYFNESCDDVGALNIREYGKFLIKHFGLTSPQWSTKVSIMNPDAKKNPDKPKQISLESIYKKALKESFSLP

SEQ ID NO: 1565 - protein, 465 aa, synthetic construct
  REGION 1..465: note = Synthetic
AIIPTGVKLTGVELSPEFMEYKQEFDSLQRKFCALFGGWVLAGKVKSIDNKYVKFNEEMWDGKFGRKEQHPKDEASLRHIKALPEIKSLLASELPKEKLDNLLGAAVDDMLWYVVERFKSFVKRNSTKSKKKFPKNGITLKQNKAMNFKDGKIKVNAKEKTFTIKTIQKKQEITLSFKDSYYNNLDLVDGEWRGGNIVFNSLEVNADNELVLKVEEEREMSFPKIMIGVDVNKAKENWFTISEAMENGKVTVPKPNNIASLESKRDEMNAKVRPSNKKKEESEYRLNSAQKRIMYRRIHKIMANRHTAIEEAVVPVLNYFFEKYGDDLGVAIDGVATGARGGNSFGQEDVRDVMWRWCVKNNVPFIIVPPNYTSQKCPECGHIHKQDRKKNMNAFMCPSCGYFNESCDHVGALNIRDHGKFLLEKFKLTSTSLSTNVDKTPLAKTFKNALYEEFNFPQFKRIPHL

SEQ ID NO: 1566 - protein, 478 aa, synthetic construct
  REGION 1..478: note = Synthetic
IFSPRACRLNGVKLTPEFKIEHDTISSIQKDLSIWIYEKICKKEIAEINDKYIKFKNKAWDDWAGLSFQGKQCKSWRETELSLRQLKCHPEVQEIFLKHTPHIEKKELNLSRLDDVLWKVVENYKGFQNRNSKKTKRPIFLKTNKALNFKNGGIWIEDNKIKLSTLQKRKFIYLTFKEDVYDNQDSIDYKTGSGKGGNISFNGLYKQDDNFLVIQLVEEQESSFFKKVIGIDINKNDLQWITFSEPIFNKTQRAITKGEEIKGLEIQAKTLNQDLLKNKSKYNSKQRRKLHQRKKRAERRLKLSIKEKIVKPAFLYYIKKYDSKVSFSIDDIGFGNQNSFGQEYIRDAFVSLCKKNNIAFAICPPSFSSQMCPKCGSLHKQDRKLINSYTCKSCGHFHKNCDELGAENIAKFGSVLMKEVCISSTSKSFQIPIPHKSKFWSLYVPDDDERKKPIKRKLDSIYNKVLKTQFNFPDSSSR

SEQ ID NO: 1567 - protein, 460 aa, synthetic construct
  REGION 1..460: note = Synthetic
EPDPRGSKFMIAKEAFDLEGFLEIYQEDLRITTDSIFNFIKEIISNYGADNVNINPHQIKITNDDIDDYQYLGFDNKKYDFSFGVYNRKGELQKDGMPKNEWVKAKDLLDSDTVTHKKITDTSMKDMLESVLPNTGNAWRSDLVAYYIKMLKSRIRGDKFNKSSLCVKILEMTRPPQLRNETFHTKGGFKINTSKKTISIPARGVDDKGKAVRYTFPYEFTTSKLNYDGKGTGKGGNFTVTKKKNAKNNVIILAEKKDSVRFTPEDPTKWYGVDCNIKASNWLSFYDLYSQTSFKWKRGEFPQRIIDKVKELNKEIGNKDRGNIKSKHRRPKRLQVVKYIPRKLDKYITRIFTPLVKKCKATGKGLAIDGAAFGHKAGNFGQENIRRVVPKLCREMGVPCLVVPPKNTSKTCSSCGHIVTYAQNKKFHDTEVFDCPECDNVMDEASNAAKNIALYASRSD

SEQ ID NO: 1568 - protein, 503 aa, synthetic construct
  REGION 1..503: note = Synthetic
KTKIRGIHFFVLIKYAQEFVNEGKVFVENYNKITWPLWEFYRKIIRDYPGTKLTKFGMLFQTDDESIIGLDGNTYELSEKVTNRKVGNKSWFTKSEQLADDEIDYSAGKKIKDTQIKDMLQSLFPEMSGSYIFDMRDYITNRILSRKRQTTKAKTFNEVLLEMDRPPLLRNPTIHSKRKRFQIIPNKETLNTGVITYRNQKDEEISTPYVSTTPLSDVVDASELFNRNIGANFKISSKKRHKYYRLTVQCKKQQTFEYEPIGWIGIDINVAAAFWLTFYNLLTGKGFSWPRGTYAQSLIDARAEITKLIDDGSKGQCTSKTRSGLRKKRFAIHKKQRKLVRKIFIPFLKSLKIAKLGLAIDMVSWGAGSGNNGMQSSICEILPDLCREIGVPYQEVKPAFSSRDCSECGHRHTENQKKKMKETFLCKKCGWTLPMHQDAARTIAMRAKNNNDLTTVPSLAPVEDYQEIVKEVTEEINSAPSDSDGTIKRDDQGEITSPVANQQ

SEQ ID NO: 1569 - protein, 444 aa, synthetic construct
  REGION 1..444: note = Synthetic
VEVIRGNHYLISKKTPEAKILEKETDLFIDLFKALKQPYWNYLKQLPLATAPFARHGEIILFTDQDVIKGVDGKDYPLKELDDGKKKLKDSQLKDMFTPILNQAAGKELPNSWKATLIYYISRLIKSRKRNFKRGQKLGDWIKEPDSHCPKHEAHTIHSPKSMFKFNKEGELLFCLSDQDSSTRRLDYLSIPKANYEGKTPIEKFYGKSAGGNLVKNIKKRGKHHRFTMQHKRYVHFDYIPEDFVGFDINRSPENWLTFADLKDDKIWVIELKGEAAELVERRRLLNRDVDNNNRERMKSSQRKPLRYELKKVLPKRQKKLIRKIFIPILTNLKKEKKGLAIDGCAAGGRSGSFLQDTINKTLPLLCEDMGVPYEVVDPRGTSQTCSACDETVTRKKSGKSKDHNVFRCTTEGCTNHKNPIIAHHNEAINIAKWGKKSFMNRIE

SEQ ID NO: 1570 - protein, 447 aa, synthetic construct
  REGION 1..447: note = Synthetic
VEMTRGRKILFPISNKKLDAALREELRTFVKTTNMFLRELVSWLQKSEFDVIGFSTHGELYISDPEWYIGPAGGFHKPFTHKERSGEPLPYPKIKDSQLKYLFSYVFRECGCTDSHAIWKDNISASAINKLKSVIRRFKKPKVESIAEYIRRMVPPQVTNGTIAHKKSLMKYKDGVVKMTLANRNVVEIKDFSLPQTMYQEIHKSTFGGNLTIKNKANSKNHCYTVLFNCDKTFYEPKKWIGMDINKFDPYWVVIAENSGDGFEEIIAKPSQIKELEDKMKEVDKKIGNKDRKSISNKERALLREEKFRIVDLYNKAVYNLLAKNPHGESFLDFLENNQYGVGLDGVQTKGYAFGQSAINPILIKECERRRIPYLLTKAAYTTRDCYYCEARNKRPKGQDPYICENPICEKFESEEIPHVNAARNIAKKANAGFLELARKQSMVHSS

SEQ ID NO: 1571 - protein, 455 aa, synthetic construct
  REGION 1..455: note = Synthetic
NRNRTTGIRITLEPQNCTKEDIKNWMVAQRKLTNYASKNLLKLMRKDASIAEVVFKNNSHYLAYEVHHHILLPFTKFREERIKLGLRTSTNERLAAAIAGRFYHGYGQRNGSKKDVWAYALPKLPAITRQNKAVHVKDSVLRKFVDGNTITVNPEVINGQQYLSNVRFELQGLFGKIYKLKGKILSKHIHLLEFLDLKENVDCNIFLTKHGNITIMIRIDEEYELMYQPIQTLGVDFNKRKNVFVTMNDGTFIPLTSEIAEKIQCVKESDESIHEVKSSKLRQAFRMRWKQCRKELRHSLRNIADEIVAKAISKESLLAIDGVTQSQGSFGHAELKEMLVKLCKQKKVPFVIVPSAHTSSDCSYCFERSGKYNQVARSKDFEKVSCEVCGQNYNADVNAARNIAQDGWFIFTNTNEDFPKDKFGRAVRSNRPSTSVANRKKKMKFIDFSDEDITF

SEQ ID NO: 1572 - protein, 483 aa, synthetic construct
  REGION 1..483: note = Synthetic
SKEIYRCVNLFTKQNRIKDQRLNEIFKLYAKGYKSALDYMFKEFNLTKEENRFQAIKSMVKKDLGDKLFKDIDDKLTKRIQTNIYAQAYNLYKSAQMLRKFYIVSILVTQKSKRGNKNLYHDYKDYIKLFDYNKDATLKSIHRYVRQKLARTPSKKLKVMLLDSHSVQMQKSENENSINNRWLRVIPIKNKKEILIPYRANAYKDRNKLNSYQFIKTESGVFKINIVQTIDKDDEKYKDNDKIVGIDFGISDFVACDNKIFGQKFIYWLIEKDRRLAKLQATLQKNDIKPRNSKKYCALVSKIRAYTKNEVNRILNLIVSEHKAKTIRLENLEFRNQTLSKRLNRLLSKFCNKIVEEKLQRLLDVYDISVEYINPVYTSQTCFKCGYVSKNNRNGRKFKCRCCGYKANANINASNNIARRSCDINRSKNQVLQTCFDKFLSKFSCMRLANNFVVISSLKSSAVAINNKIVRNPALFAYLDAKT

SEQ ID NO: 1573 - protein, 482 aa, synthetic construct
  REGION 1..482: note = Synthetic
NDKIFRSVDLFVKHNAIKDIRLNELYSVYSKAYATALSFMLKSFYQTKNDNPYIAIKSLPTKEILEAIFENYLDIASKRLLALVYQQAYAAFKSHVKLVKYYVIEATRKTKSLNGNKSLYYDYKENIKNYLFKEDAILRSVLRHIIKRAAIRPSLKLRTMSLDSHVVKIEEANSSKSFDKWIRVAPLKDKEAIYLPYKNSEYKEANALKAYQFIKRDNKFSVRVSQTVDKLDYTPSDKVVGIDLGLSDFFATSSNKILGKGFISWIKKQDETLTKLQASLQSQGIKPRSSKRYRNLVQRIRDYAKNEINRLFNQVIRYDKPKTIRVEFLDFRNQNLGKSTNRLLTKLGNKYVEEKLQRIADIYGIEVEYVNPAYTSQTCSSCGYVDKNNRKGIDFKCLYCGKKLNANVNASLNISGRSRDSLKLAKNQSLIEILTRFTRNNSIKRVGTNSFSLCAKSCARTANVVNPYLEYYFASLNLSEVV

SEQ ID NO: 1574 - protein, 461 aa, synthetic construct
  REGION 1..461: note = Synthetic
NKNPIRAVNAFTEQNSIKDCRLQVIFSHCAKAYKLVVDFIYKEYLINKELSDQSQPNKERLEQIITDDLLNIIPARMQTIVYQQAYGAVKSNVNLAKFYLDDLTFKFKRDYKREPGQIEIKAIKRHIRSHLACKISTKLRNIVADSHMIRIEQAERSKHFDRWIRVMNLKGLEPIYIPYKSSEYKEENLRNSMNIVKRGNRFEFLLNQDVKKLEYTPKCDVIGIDFGLKDFMAINNKILGNKFVSWLKKQDDTLTKLQASLQLNGLKPRQSKKYRKLVQRIRDYTKNEICRLFNLIVDMAPRTIRLENLEFRHQSLSKKLNRLLSKFANKTIKEKLQRLVDIYGINVEYVNPAYTSKECSECHYISTTNRVNTKIFVCKYCGNKLNANVNAARNIARRSCNSLKRSIKQVLIDRFNIFMLDNEIMRLSENKFLIRSKSRADVETVVRNKYLKLFMAKSTNA

SEQ ID NO: 1575 - protein, 346 aa, synthetic construct
  REGION 1..346: note = Synthetic
LARKIFKDLLGKNKRPRFNNISMHLDGKVIDVSKKKENGAKSFDYWIKIATLEKGKPIYIPLKANTYAEEFEGEFLNYCQVVEDDDRNIEFRVVKELKKKEYIPLTDEIAIDLGLNPLFATDKGDLFGRNFLDVLKSFDEKITKRMASLQKRNIKPRDDKKYRQYVDKLRDYLKNEINRLLNVIVKIYKPKRIIIERLDFRSPELSKRLNRLIQRFGKKYIKQKLERLQQLYGIEIIEINPAYTSQECSSCGYVDERNRKNTQEFECRACGNKTNAQINGARNILKRSSLGSLYLTKKQVLKILTERYLERLKGCKSPPLDILKGNPYFKDCLESILNPCQGLTSS

SEQ ID NO: 1576 - protein, 519 aa, synthetic construct
  REGION 1..519: note = Synthetic
RIFGSYLFKNYANKGKLEKINQVLTEYRKTAKDIAIYLWDIFFRFGKLPHRKKINIKHIPSYLSERYKYVCAWQVYNVLSSYIANIQYQFANIVFGSSLNKEDKLILLALNNVKGWLVYDKDEIEIYDRKGKDVEKKTVKVSEFHKKLARKIFKHLLGKNKRPGFNNISMHLDGKVVDISKKKENKAVEFDYWIKIATLEKGKPIYIPLKANTYAEELEGEFLNYCQVVEDDDGNIEFRIIKQLKKKEYIPLIDEIAIDLGLNPLFATNKGDLFGRNFLDVLKSFDEKITKRMASLQKRNIKPRDDKKYRQYVDKLRDYLKNEINRLLNVIVKIYKPKRIIVEKLYFRSPELSKRLNRLIQRFGKKYIKQKLERLQQLYGIEIVEINPAYTSQECSSCGYVDERNRKNTQEFECKACKNKINAQINGAKNILKRSSLGNLHLTKKQVLKILIERYLERLKGCKSPPLDILKGNPYFKDYLRAVSTHFGAKEQANALQNSEKCQGTLESILNPCQGLTSS

SEQ ID NO: 1577 - protein, 394 aa, synthetic construct
  REGION 1..394: note = Synthetic
VFNSNLREEDKLILLALNNVEGWLKYDKDEIEVYEKKGKRRKVKISEFHKRLARKIFKHLLDRNRKPKFSNISMHLDSKVVEISKKEKDGAKAFDYWIKVSTLEKGKPVYIPLKANTYAEKLEGEFLNYCQVVEDDGKIEFRIIKELKKKEYVPVIDEIAIDLGLRPLFATDKGDLFGRSFFDMLKTFDKKITKRMANLQKRNIKPRSDKKYRKLVDDLREFLKNEINRLINIIIKIYKPKRIVIEKLDFRSPELSKRMNRMIQNFGKRYIKEKLERLQQLYGIEIIEINPAYTSQECNSCGYVDKNNRKDTQEFECKACGNKTNAQINGAKNILKRSSLGNLTKKQVLKILIERYLERLKGCESAPLDVIGDNPYFKDYLDSILNPCQSLTPS

SEQ ID NO: 1578 - protein, 1163 aa, synthetic construct
  REGION 1..1163: note = Synthetic
LNKKTLTICQKLIPVGKTRENIDRFKAMEEDEFIKANREKVNVLIKKAAFEKIDNDLGSISKDIDFSDMFDLMGKYLECEGEGIEEISDKLFAERINLSTKLTSVFDFKFEGKDTIKVLLPEYLEKHDMDNKEELLELVEKVKSRQSMFNRYEGHIDSMLENVHKKGKFVYRILYENAIIFYNNIKKIKAFDYESVILNLEDEKNIKNNFLTKGFDSYNGFIRQSQINVYNYCVGAINYELNNYCQKNKLNYDKLELKKLNKMPLAETESFFEKIPTFDKDSDVIDAYNSVVCNINKEKITLDDKKAKSDEIIIKGSSIAKYSYNVYGNWKIVRDCLQLHCSDMVTAAKLKKSEKTLYDEYVNEGISVNLIHNIVTEYAPDLNISCTEVPLTQKIDTLMSGSFSECDYPKVSLKMNDCKEANYIRVTLDRILEARRLLCIYNTESVEFDMEFAELIESYLDILSPAILLYNMCRNYILAKPSARKKTSLTFNCTAFAQGWSEGVEYSKRVSLFKDEKENKYLAIYNALGCKESNMSVTGLVSEIYDNMTTEKQDDCYMKLVQNKTGNVSQALPRLFLNPTLSDEDRARFKAKEYNNDKEFLNHIINVVKTKIAEHETWKKYNFSFKDNYESYAEFVNDIQEQGYKTEWRYIKKSIIDDYVDGGMIYFFRIYNQDYSEFKSSDKLDIQTRYLNYLFSEENCDTDIVKLLANAEVFYREPQITNPYVHKQGSILVNKHYKDGKTVGVEYESIVKNIGDYNNVITKVAKHDIIKDKRYTVEQFELHMPLCIDNIRKETKKYDELSRKYIKESKNIITITKSRNHLLYVCVFDEKRNLLEQRSLDIANNVNYKEKIEIKEELKKINMESWKSVGSNQTIIEGYISCAIKDITDLVLKYDAVVVMEEESANADRNLLKNRNYKKFKTALINKLCYLVDNTKEDFEDGGTFKPYNLCNIEKEKDYKKIWNGIVIQVPAYYLSNKDVDSNFIELADTFANTNIQKKNVVKKFSDLRFNRNTKLFELKFESAKFKEDFKEVFICDSSGNRIVQNKKGVNEVNLTGTIKSELKKIGLEYATGENIFDYVDLKNKNHVTTLHKIIRLILQMYNVGANNSYFYSPVSHSLIRTDKDIYEVITCINLYERAMRVKKKISKDGKVKFKNLADIVIG

SEQ ID NO: 1579 - protein, 1134 aa, synthetic construct
  REGION 1..1134: note = Synthetic
LEEKTINICRELKPIGKTRSNIDKFKAMEDDDFIYKNKYVINDLLKKVAMEKVEKALKSISKELDFSEMFALMETLDEMQGEERGEVLQNLFAERIALLNELSTVVDFKFTNKKTIEVMLPEYVENHNFKNKDELMKMVEIIKPRQAKFERFEKNIDSLINMNLKKGSLSYRILVENPQIHLENVRLLTRFDYAGILREEPDEVISFCKNSSLDDYNSLLFQKNIDVYNYCVGVINQKLNEYCQQEKLSYSELELKTLRKLPLSERKSFFDKIPFFESDKELVESYNKLVTKLNNHSFNSDVLGNDSNIYIKSNKINNYSNIVYGKWSTINDCLEEYCNEYGEKKEKVLNNISVYDINNMVEEFSEKLEIPYNNNSLQQIIEFSFANTKYAKCDIPMISLRNDECKEKYEIKKNLDKAIEFIRLLRLFDTENENFSFDAKQEIEKTLEIYNDINLLYNMARNYITQKGNNKIKKALSFSTSGFAGGWSESVENTKRVFLMKDDLGSKYLGIYNLIGCKANGKSVSSVSRTIKESLTEEKTEKQCYRKMVYSVTSDVKKSIPRLFVNSQLPEPELTRFKKKEYNDDEKFLTFIIDFIKEKIKKHETWRSYNFKYKEHYESYDEFCDDLQKQGYILKWKYIEKSIIDELVDNGCIYLFKISSKYDRYNFKKSIHEKYIDALFSDENENGKLIRLLGNAEVFYREPQIKNPYIHKKGSILVNKHYDNGKTIGSEYSEIAKNIQGTTVDGIVAKVCDREIIKDERYTKEQFSIHIPVKIGNISSKEKVDSLAIEKLKKPHNTIVITRSNNHFLYAVVFDDKMNVLEKRSLNVVKGVNYKEKLEIAEDLKKKDALSWKEIKSTSGLLDGYISYAIREVADLVLKYDAMVVLEKATVNGGSFNLLSTRTYEKFKNALINKLQFLNDVSKKDTEPGGVLNPYNLTHVGKDKDFEKELNGIVLQIPAFYMAMKDINSEFVLLKSPFAKNQSQRKNLVNKFKNFNFNNEKNVFELEYDSKKFNSKYKNTFICDSFGERIIRQNGETERVNLTDYIKQNLSENGLDFRTGENLYSIYDEQNKSHVNAIYESIKLILQMYNFDSNEAYYVSPVSHTIITDSNCREIVQSINLYKKAVELAKQYYI

SEQ ID NO: 1580 - protein, 1170 aa, synthetic construct
  REGION 1..1170: note = Synthetic
LKQKQITICQKLIPVGMTRKNIDIFNAMESDEYVSENKGEIRKLIKLLAREKMEEGISKAKPNLSFTKLLGLMSEYNEADSEHKMEVLERLFDERVRLANIIASEFKAKFSCADTITTLLPEYVNEHFNGREREEYLNLLEEVKKHQAMFNKFELNIDNVFSSMLKKGSVVYRMLVENTQIFLNNKLKTDKKDFKKIIDLSELDDETKSIIIKRCIDIDEESYAEVLIQEDIDRYNYCIGMLNSESKMYCDKNKLNYKDFELKNLYKAMLCEKTAFFEKIDSFKNDEQVVDSYNSLMANINEKNIAKTYEKCMGHKDGMHIKPSALSFYSNVVYGKWNVVRNCIRAYCQDEMNSTKKNKKSLDDYYEIFIKKGITINQISNIVSSYAEELELKAFEKDLSNTIYSYLLHKYSCVEEEKTPLKSDESKNAETIRVELEHCIQALRLLKIYDTENDNLNEEMKTLIDEIIDELSPAILLFNMTRNYITAKPTPKKKLALTFNTASFGGGWSESVESSKRVSLLKDDEGNKYLMIYNITGCKANNVSMVSVTEKVKANLLNDKKNIDCYRKLVYSAVPDALKDISRLFINKLEDEEMIKRYKNKEHKENREFLNELINVLKEKINEHPTWSRYGFKFRNEYDSFDDFCSDINNQGYYAKWKYIPKTVIDEYVENGCVYLFRIYNNDYSAYKKAGSKIKTHTRYLDYLFSDENEKTALIRLLGGLEVFYRESQIKNPYVHKKGSILVNKKYKDGTIIGNEYKELFKKAQTTKLDNVYTRVCPYDIIKDKRYTMEQFEVHFPILIGNNNNPESFIEMSKHFVENAKHTVVVGRNRDNLLYVSVYEENALIHSKSLNKVNGTNYKDKLFIIEDAKKNNARNWKTIGSNDALLTGYISAVIKDITDLVLKYNAALVIEMGSNLAKDRNLLPNRVYTKFKEALLHKLEFLIDSEKADDEPGGLLHPYHLAEINKKNPKRSIDTPHNGIVLQVPSFYCGLTDPESNLCNLTYARTKKEKEEVLKKIKGFKYNKEESIFEFVYDMSLFNPNMKGKFTCTSNGNRLVDTENDKVVMDLTHYIEDKLKSLGIEYKSGNEINLISDYGVTNETLFNCIRYTLQMNNGNFFISPVTGFSYTCDGCSNISYNRNLYNRSKLVNENIKSGKKLKLMTIKDIYKPQS

SEQ ID NO: 1581 - protein, 1232 aa, synthetic construct
  REGION 1..1232: note = Synthetic
RNQITKSLRLELRPQGKTLRNIKELNLLEQDKAIYALLERLKPVIDEGIKDIARDTLKNCELSFEKLYEHFLSGDKKAYAKESERLKKEIVKTLIKNLPEGIGKISEINSAKYLNGVLYDFIDKTHKDSEEKQNILSDILETKGYLALFSKFLTSRITTLEQSMPKRVIENFEIYAANIPKMQDALERGAVSFAIEYESICSVDYYNQILSQEDIDSYNRLISGIMDEDGAKEKGINQTISEKNIKIKSEHLEEKPFRILKQLHKQILEEREKAFTIDHIDSDEEVVQVTKEAFEQTKEQWENIKKINGFYAKDPGDITLFIVVGPNQTHVLSQLIYGEHDRIRLLLEEYEKNTLEVLPRRTKSEKARYDKFVNAVPKKVAKESHTFDGLQKMTGDDRLFILYRDELARNYMRIKEAYGTFERDILKSRRGIKGNRDVQESLVSFYDELTKFRSALRIINSGNDEKADPIFYNTFDGIFEKANRTYKAENLCRNYVTKSPADDARIMASCLGTPARLRTHWWNGEENFAINDVAMIRRGDEYYYFVLTPDVKPVDLKTKDETDAQIFVQRKGAKSFLGLPKALFKCILEPYFESPEHKNDKNCVIEEYVSKPLTIDRRAYDIFKNGTFKKTNIGIDGLTEEKFKDDCRYLIDVYKEFIAVYTRYSCFNMSGLKRADEYNDIGEFFSDVDTRLCTMEWIPVSFERINDMVDKKEGLLFLVRSMFLYNRPRKPYERTFIQLFSDSNMEHTSMLLNSRAMIQYRAASLPRRVTHKKGSILVALRDSNGEHIPMHIREAIYKMKNNFDISSEDFIMAKAYLAEHDVAIKKANEDIIRNRRYTEDKFFLSLSYTKNADISARTLDYINDKVEEDTQDSRMAVIVTRNLKDLTYVAVVDEKNNVLEEKSLNEIDGVNYRELLKERTKIKYHDKTRLWQYDVSSKGLKEAYVELAVTQISKLATKYNAVVVVESMSSTFKDKFSFLDEQIFKAFEARLCARMSDLSFNTIKEGEAGSISNPIQVSNNNGNSYQDGVIYFLNNAYTRTLCPDTGFVDVFDKTRLITMQSKRQFFAKMKDIRIDDGEMLFTFNLEEYPTKRLLDRKEWTVKIAGDGSYFDKDKGEYVYVNDIVREQIIPALLEDKAVFDGNMAEKFLDKTAISGKSVELIYKWFANALYGIITKKDGEKIYRSPITGTEIDVSKNTTYNFGKKFMFKQEYRGDGDFLDAFLNYMQAQDIAV

SEQ ID NO: 1582 - protein, 1240 aa, synthetic construct
  REGION 1..1240: note = Synthetic
RNHITKALRMELIPQGKTQNVIDEKGDRKYDAALYSSLERLKPVIDSFIRSTASRALSDVDYDFNAMHDAYINKDKKSWAKEEKALKKVLMKAVDEALPKGLKCSQINSAAFLQEVLREYVLHATDTELRKDVALKDIEETKGCLALFSKFLTTRITALTVWMPERVIENFKIYCSNIPRIEAIFNEAKDIANNYSDELELMKTAQYYTKILSQDAIDGYNLVIAGKITENGIETKGLNVLINEYNIDVKNQKLDKPYLRKINQLYKQTLFSSEKQFVITAIKTDDEVRRVIKSAWESFDGAATKMLGLFKETLEATNGNGVCVKGNRLHILSHALLGEHKAITDNLVKAELVEIHEMLKNEALKPSMRAELEKRVDIAQSLVVKKDYSFTALDEAVTSIDENVIGLSKGAFNLYVAKTEELIKEAKMYYKVLEGGDIFKKRHIKGDKHVQEMLVDFFDALTEVRNIISVISMPDENEDADVSFYNRFDEIYENIRLTYKAENLVRNYITKSVKDTAEEKQTCFGTPARLRTQWWNGEQKFAKNHAAIIKHDGKYYYFILAGDSKPIEIKEDGNSATGLLTLKKGQKSFMMLPKILFTDHAVPFFEGNKDAMEYTLDDESVIRPVKVGRMLYEIYKKGLFKREAVTSGAITEEEYAKNIQALIEKYTEFANAYVQYQKFNLDDINDPTRYSDIGEFFSEVDTCTSRLSWTYIDYAQIANLVDSGSAYLFLISTKFLYTESEDKNAYTKTFRSILSDANMDKTTILLNSNPAVFFRPQSIKKEITHKAGSIMVNKLTEDGEHIPKKIYEAIYKSKNEMSGVSEEDMAAANEYMRTHKVRSFKAKYDKTYRGNYMSDKYTLQLTYTKNNDVSDRVNDMLNDRVIEAMQDGFNIVSVARSTKDMVYALVLDSSLKIIKELSLNVIDGVDYYALLHDTYLEKKENKKLWIYDTENTELKSAYIDLAISEILKLAREYNAVIAVESISDAVKNKYSFIDNQVFKAFENRIAQRLSDLTYKDVVDGRPGSVSNPLQLSNNNGNTYQDGILFFINGAYTRGIDPSSGFTSLFDFSRYNSIASKRQFFSKMAKISYTGDSIVFDFDYVDYPVHVDTEKTKWQVKLSGDVVVYDREKKQNKRIKDVVNEIIIPLAGKTDLNGNIAENILNKDVPGAFVEELFRWFRYAVTGIHAQVKGKDEFYKSPVDGNEYNISNMLAFNLAKKLVFRLEYAGESKDFTKEWLNYMQA

SEQ ID NO: 1583 - protein, 1223 aa, synthetic construct
  REGION 1..1223: note = Synthetic
RAPLTKTITLRLKPIGETRETIREQKLLEQDAAFRKLVETVTPIVDDCIRKIADNALCHFGTEYDFSCLGNAISKNDSKAIKKETEKVEKLLAKVLTENLPDGLRKVNDINSAAFIQDTLTSFVQDDADKRVLIQELKGKTVLMQRFLTTRITALTVWLPDRVFENFNIFIENAEKMRILLDSPLNEKIMKFDPDAEQYASLEFYGQCLSQKDIDSYNLIISGIYADDEVKNPGINEIVKEYNQQIRGDKDESPLPKLKKLHKQILMPVEKAFFVRVLSNDSDARSILEKILKDTEMLPSKIIEAMKEADAGDIAVYGSRLHELSHVIYGDHGKLSQIIYDKESKRISELMETLSPKERKESKKRLEGLEEHIRKSTYTFDELNRYAEKNVMAAYIAAVEESCAEIMRKEKDLRTLLSKEDVKIRGNRHNTLIVKNYFNAWTVFRNLIRILRRKSEAEIDSDFYDVLDDSVEVLSLTYKGENLCRSYITKKIGSDLKPEIATYGSALRPNSRWWSPGEKFNVKFHTIVRRDGRLYYFILPKGAKPVELEDMDGDIECLQMRKIPNPTIFLPKLVFKDPEAFFRDNPEADEFVFLSGMKAPVTITRETYEAYRYKLYTVGKLRDGEVSEEEYKRALLQVLTAYKEFLENRMIYADLNFGFKDLEEYKDSSEFIKQVETHNTFMCWAKVSSSQLDDLVKSGNGLLFEIWSERLESYYKYGNEKVLRGYEGVLLSILKDENLVSMRTLLNSRPMLVYRPKESSKPMVVHRDGSRVVDRFDKDGKYIPPEVHDELYRFFNNLLIKEKLGEKARKILDNKKVKVKVLESERVKWSKFYDEQFAVTFSVKKNADCLDTTKDLNAEVMEQYSESNRLILIRNTTDILYYLVLDKNGKVLKQRSLNIINDGARDVDWKERFRQVTKDRNEGYNEWDYSRTSNDLKEVYLNYALKEIAEAVIEYNAILIIEKMSNAFKDKYSFLDDVTFKGFETKLLAKLSDLHFRGIKDGEPCSFTNPLQLCQNDSNKILQDGVIFMVPNSMTRSLDPDTGFIFAINDHNIRTKKAKLNFLSKFDQLKVSSEGCLIMKYSGDSLPTHNTDNRVWNCCCNHPITNYDRETKKVEFIEEPVEELSRVLEENGIETDTELNKLNERENVPGKVVDAIYSLVLNYLRGTVSGVAGQRAVYYSPVTGKKYDISFIQAMNLNRKCDYYRIGSKERGEWTDFVAQLIN

SEQ ID NO: 1584 - protein, 1200 aa, synthetic construct
  REGION 1..1200: note = Synthetic
RNKVVKSCTFELVPQGATSKTIEQSKFLNTDADWKQLISEIAPYIDAFIRNIVSCALSRVELDCSKDEMDEVKLASEINLAINSALNEKYGIYVKQIKSAKFINSVLPDFVDTLDLDENESIAVHNVLEELRGKTELVNEFLTSRVTALNTSVARRVCENFERYQENVKVFEKLQASSLWDTIVALYPNAGDFANVDSYNECITQEQIDTYNDMINGISDENGIIVKGIRGLINEYRMLEKNEKLPSPKELYKQILIPGKKAFSIICIDNDDELYDVISEASEHAVAAGKRFCDLIDNASAYDIVVQYKNLHTISHIVTGEHRTIPDAVKDVMYAAINQQIEAATTAKKRLALQKKVDDIEKALKKCDWTMDELEKISNLGIFSAYKTSAKNAYLLASGTVGTIPALTKDIRNNDAQREELKSIFNVWTEFRDLVRLVKRQTLDKGYHAFYDALDEIIFELSYMAKAETLTIAYVTRKPKDVSKKALASMGYQARMGAAWLQPDKKLSICDMTILKRDGKYYLYMLAPGVKPVNITTDKSDEYVFVQKKGQDASKALPKVTFYTASKFFEENPDAEEFVITNNVTEPVTISRELFDMKENGLFKTDAVKKGLITQEEYEKNLFEILSFYRHFMDVYTEYSKFDVQTKSDLHDYKDSGEFFTDVNAANVSSEWLPADTKKMDEMVDKGEALMFLITNRNMYSQFGKKTAYAELFLTAMSDSNMGVFLNSSPKMYFRAKSITKPIVHKKGSILVHKHDTNGNKIPKAIYDEIYKYYNNKLFATDLSQEARDYIDRGLVGKKKADTDIVKDNRYTEDKWMIQFSYTKNRTVIPASTKLNDIIRQNAANMNVLSIIRSETDLAYYMVTAPDGTVLEKQSLNIIDGRDYWSELSTISAKRKDEKSQSWNYSRQVKDQRDPYIVRAISVIARKVIEYNAIVVIERIRPEIKNRFDAMDNTVFKKFEGMLISRLADLYFSDVPAGEPGSVMNPYQLCENSGNDYQDGIVFFVSNAYTGNVDNQTGFVNIFDLGNVGTVSAKRLFLSKFDSIVYDPAQNRFVFDFDYDNFVTKTCMKKTKWSILAGGEALIFNREFKYNTYYPETASMITKIMAEKNVSLSDNLAKLAATGELPGDVTTALFDAFRRAISGVISKHEDMPKRYISPVTGEAVIYNDNAAENLTRRFRFNMAELEKDKTAREEWIDNIA

SEQ ID NO: 1585 - protein, 1265 aa, synthetic construct
  REGION 1..1265: note = Synthetic
KERLTKVLSFELKPIGKTRQTITDKKLLKTDQEIHERLDTVKPLIDLFYKHYIREALFLMGQPGSDYYIDFTKLEADYRFTSDKELSAEKHRVVVKNYQKDITEIQKIFHAAFLSVCPVKEKDLISAKLFEGIKKYVDTHLVGDPNYMEYQEIMENVTGCAVLLKKFMNTRLTALNTVGKRIMENFECYCNNIANIQLFMKSQVFSELEKNFPDLSSFQYADYYAKILTQEGIDYYNLMISGIFYPDGTRVKGFNMCVNEENIKNRNDHTYTGSFFRTLKKLDKQILYPAEKVFSIEHLDSDEEVRILFRELNGKVPTKKLLDIILLLKETTGDGIFVIGNDVHTLSHLCIKDHNTYPELLEKNYIVQRTNELETVSKQSERKKIEKNIINARSIVGSGNIQYSLEELSVICKSDVKSLYIHELELLYKRVLSKKELFDKSGLIKFGDFHSKVNKKIIKDYLESINDFRHVVQLIARGAESEQADILFYEDLNKQLECFTTAKKALNLVRNYVTRKPADTAKGATTETFFGSAQKTIAKWWNGVDKIDVGKNLILQKDNRYFFATLLPGNSISADSLLKGKSNYSVLTVKKGSNGMKNELPKRMFGQSNGKISVKKMFEADIDYCEWSGTKQDMKYPVKISRELYEANEKGLKTQDAVKKHLCTEEERRYWEVETIRLAQQILPLTVSYANVNWNFKAPEDYSSWLEFCAYCDTKAAYYSWLDVDENQINSLVEDGAMLLFQISHRDLYKNKKNPDSYVKTLEYLLSEENFKNPVIHLNGAPSFQYRKAVYERKITHKKGSILVNRWDKNGEQILNDIYMEIYNYYQGYVSKEELSKEALEELPFVRTKTAWMNFIKSAKYTKEKFLIRIIYTKNADVLNYGYNMINEETKEEIQEAGKAVLSISRSIYDLLYCVLFDKNGKVIEKRSLNIINGIDYYSLLKKIDKYRKSEKSNNWEYTTRIKDIRTHYIDLAIGEIVKYVTTYDAVIVLEKVNNSFKNKMQMIDNQLFKTFESRLELRLNDCYNKNISDGEAGSLTNPYQLTKQGNLSSVQNGYVFYLNGAYTNMCPVSGFVNFFNFGNINALKTKKELLLAMKKISYINNSFQFEFNYNSMERFLKDSWKNTTKEVKKTGYVLKTDWLITAVGPVTRYDREKKKNGYVADRTQKAYDLLKEHNCINDNGNVLVDTLNNTSLNAVYDLFAETVTNTTVRKCDVVPEEYYVSPVAGACLDISPSEIMAENLGRKFFYFMMHDTTEGYIGYMQEQH

SEQ ID NO: 1586 - protein, 1254 aa, synthetic construct
  REGION 1..1254: note = Synthetic
LNSTIKSATFELVPVGKTRDFLELHDVIKEDSERKAKVVLVKEVSDTFIVEFLRNYNNAGICDWENLHKIYNSATCTEIRGCIEKEKEKIAKDLNSALNAYIESFLKYNDINCSDVGWNKKSYVEVALPLYAKSVPDFNTDEYEDALASMKASSSAMFKKCRATYERIINGTNHGSIADRVIENFETFLANKLLYEKILETATGFENDETFTNVSQFGKYLSQNGIDKYNSTIGDFYNSSGELIKRGVNSRITEWNQSNPDNKLPKLQKLKKQILVDREKMFTIETIENKSDFNKTLNTVLILDEKITIETTKLLTSILAKDMYNTEGVYVTRAGGSYIANGLTGSWDYFEAIKTDAITKTVKDKLLTDYFNAKGKVKTNLTKADEKEIEKATKDFSYTIAELDRMLAGTDYITVEEMLIKKLEELKSRKKESYHLMTTYAFWNNDNKPTQDENGVIQKYLDDVLAVVRFTKIFSIDVKLTNADTIFMEDVAGMDKDKHGINKTYNMIRNYLTKKTELDAKQRRVQLCFGRPTHFEQKWNLMHGDKGIFGNCDAGLLEKDGCYYYIVPASKNGEKLNIHVSDCEDEADSYNMLSTKKGMGFLKMLIKCTLKSKSAIAKYKETDEPFELPIGDETITISKKMAEDYANKKYSKSKEELIKVIDFAKEFIAKHPSFKRYDLSSLKESSAYDNLKQFSDEVDSLCFAVTRLYVSKEQIDDAVEKGNLYMFMITSQDMYKSADKKHNIYSIRFNAIMKSMFEAGNHIIVNNSPSIYYRPALIEAEDKHPAGSILVNKLTTEGKTIPGEIYLELCAFYNGKCDKLSPLASVYNEKVSVKESTFPHIKDKHYTEEKFSITLSYKMNTNVVGNTSVFTLNNLVQEDIRENGCNIMSVIRGMDNLLYYCIVDSGNKRIASGNLNTIGNADYYEKLCVLGTQRYIDAKNWKYEKKVAELKETYLRQICRKIIKIAIENNAVICIDKVSDLRKNKLSAFDNQVYKKFENTLITALANYYDTSIPNTEAGGSLNPLQLAVEGADTMQNGILFHVAETNTRNICMKTGFINLMSTFGISTVKAKMEYLKKVSRIYYDSKADDFVFEFTWRNLGCCLKKDELPLYNGLDKVWQLHTHLTRLKWNKEKSQYEEIDGTELIKAIRRSHSDMIGKDIEVDMLSSKEIQTLYDVFILYANGFMPKEFMEDTSSYDSPIVPWSSVGRIEYDEMTAYQLCRKASLTMEKIKKGLSSKELVVYRTEWLNYLLEN

SEQ ID NO: 1587 - protein, 1251 aa, synthetic construct
  REGION 1..1251: note = Synthetic
LNSIIKTCSFEMIPIGKTRETMEKHNVIEEDAERKSNAELTKEVSDSFIREFIADYKKDMDWKDLYDAYGEDRARFTDIMNQKAEKLAKRFSDSFNEYINTFLKANGINDKKSKWSDSGYVDVVLPLYVSIHPDFSNDKYERAVASLLHCSNSLFKKYTTSYARIIAGTKKGSFADRSMENFQTACANSVMFDLISRNLSSVGSHDAFKEVFADAPLNMNEYLSQKGISRYNEFVGDSFDESGQVIRYGVNHYINEWNQTHPDERMPKMHKLKKQILSIVEPSFRIRTINDETELFGTFDNIRTAEQRYAGMLESILENMNTADIYDKSGILVTSAERDSLANAITGEWSYFRRQIKEEEENRIREEYLQKKNRVKTKLTQKDNKQIEDALNKSIYSVADLNKMLGSDFGTIEEKLLDEYIRNKSKKESAYAQLVKTDFYDKKTIPAGDDVQRIQQYLDKVLSLTHIVRGLCADSQDPRTDFVFSDDVSSLEDDRVQIISCYNLIRNFVTKKREKTAKEKQIQLCFGRPAHFEQVWNNKQEGKFGNVDAALLEYAGKYYYMVPAAKNEAKLNFPVTDEPQMGECYNYLATKKAIGFAKAFAKFYIKSPEAMEGFEKTEEPFEISVGNDTMIISRKVYEDYEAKTFRESEEAKNKLIDCAKEFLSKNLSYCIYDWSGLKETKDYVNYGEFCNEVDSIAFRVINRYVSKKLVDDAVERGNLYMFEISSLDMYKDSSRMKNIMALRFNQIMNGMFTGDKFIIINNAPQIRYRPVVIEKKDVHPVGSRLVNKNTTDGRTIPGDVYLELCAYYNGKKDSLSPEASLYNEKVSVKDSDRAHIKDKHYTEEKFLITFSYTANKNVASATSGYQLNEMVRKEIRENGCNIMAVIRGIDNLLYYAVVDENGNRIEAGDLNVVGDTDFYEKLTILGKQRYTDQKNWKHENKVADLKDTYLGQVCRKIASIAVKNNAVIVIDKINERTKRKNAAFDNNMYRKFENALVNSLTDYYDIGIRGDEPGSVKNPLQLTVKEDNGFQNGIIFYQFDTFTKNICMRTGFVNLLNTFEIKTVASKVAFLKKLSGIYYDNDINEFVFEFTWRNIGCILKDEELSLYNGMDKIWKVRTHFTRYMRNAEKNKYVEIDGTEVLKELIRKNHPDMIGGKIDVDRLTSEEVKKVFEIFTLYTNGYIPRMDDAESGYMSPACDWNNFGTIRYDEMTALQLAKKSSLMIGKVKSGKDWKDMNVSRVEWLNHVLKADW

SEQ ID NO: 1588 - protein, 1224 aa, synthetic construct
  REGION 1..1224: note = Synthetic
QGKLIKGIKLELVPQGNTRDAISEYKIVEADQQLADMVKEVVMAGNEFYKDFIKQIVGHMDGADWQAYGEAVENKATEQKTYDEAVKSISASIKNAILGTAELYGGKKTLFAKDFITIVLRKYVETAENFPYNRERILTCIDVLSDKNVLFKTPYVKWEHIIFGENKGSIAERMLSNFDIFYDNKNKYAALRETATITDFDDFFTDYASYTRYIGQDGIELYNSAISGIYSESGTKISEGINEYINKLKMKHPELHVNMLKKLQKQILSNSEPLFKVATIQSAEELKGIMNKVKVAEESVLSSAKELLVHMETSDLRDLYISGQRLYFVCQKVAKDGGILEELIFNDECSKVEKLTEKKKEEIRDAIVKHDYSFAYIDSLLSEYAEKQVKMVINEELQKLISAIVSSGTSYDSITINPKWKAVPDKEVTIIREYLESFVELNKFLKCLRVRDSDVYPDFKTYATLNVLADELGALNKAYNMVRNFVTKKVNDKDGKTRLCFGRGALLERGWNRKNQAVDWLGNIDHMLLIKDGKYYYAVPAPVKRKTKIYISDTKPSDEVYEYMEISKQSSFLKTFARLFTSLGLKNIGDADDITMDLGNGSMTVTKEFLVKYKDGECKKNTDFMHKSIDIAKEFLTKHYSYATFNFSELKKTEDYTSFYEFANDVDKYTYAVKTKYIDAAIIDKAVEDKELLLFMLSSMDLYKSQEKCKDITALYTRYFFSEENRKKADIWLNANPAIYYRKPLIKFEKTHPAGSILVRKTYEDKDGITHIVPDNVYMSLYNHYNKNTPLNEEAMRYVDLVEHHVAVQDYVKDARYTREMFTINLSFTLNGNAGDAAQAYTINNMVKEEIKAKMPRMLTVVRGYRNLLEYCVTDETGKVFESGNFNTIGEINFKEKLEDLDRARKADAQNWKYEKTVVNIKESYLGMVTSSIVKKAVAYNAIINVEQLSDAFKDKRSCMDNQVFKKFEEKLVSKLACYYDKAKAPTEPGGYLNPLQLASPNCLSNTQNGILFYVSPAYTNEVCPKSNFINLLDFSAAKTLKAKREFLRKMNEICYDVEHEAFHFSFCYDDMPIKLPVKEKKELNDKTNQEFGKHIWTVYTNGVRTEYNKKERKLVELNGTEILGKECAKNKVMLTDHMDVDSMPNSVVNEMIHIFQKYSFGEVAQKDVYYVSPTSPQTEPLCTPGELRLKSMSEKGYMILHNIVAGKEKFAVNKIEWLEEKLG

SEQ ID NO: 1589 - protein, 861 aa, synthetic construct
  REGION 1..861: note = Synthetic
NIIKTSFAKEDKRSIYVKKSYLSTISMDIYGKWDVLQRNLNTYCSEKNITLQDVVSVDMIEQALEQKDSVINTVKNKLSEAISVEKQISKIQDLCADKNVLAHKTIIKEFYEKMLLIQRSLNIFDLDNIENVFISEIIANKEKMHELNTIYNMVRKFCTKSPIKKDTYPLYFNKSSCLSSFDYDKFKDGTSISSILRKDGLYYLLILNPEYATKLPEKAKTNEQGYEQLVYKQLTGLNKMFPKVFLAKSNEELYSPSERILNIAKNKLYTKEAADRESCVEWISFCIESFKKNKDWMKNFNPSFRKPEEYASANEFYTELERSTIRMDFSESVDESYLRQAVSRGEIFLFQLYSKDFSPYHNGKDSIYTRLLKEMFSEENLHRINHTDETALKLASGGSQLTFRKASLPYKETHPANVPIANKNPLNQKKESTFDYPLCKDKRYMTDKYLLSLAVQIGFRNEEVYKYDLNRMVNESVLKQMPNILSVRAGERHLLYYIVTDPNGNILEQDSLNIIHSKNDKQEVRTDYKEILVKRENEIAEAKEKWDYSKDIKKIKEGYLSQAIYTIVKLREKYNAVIFVEDYSGPFVQGRMKNMKTIYQQFQKALLQKLSCYVPEDKSHNEAIQLAYPVSSLEELKGQSGIVYFVNPSYTANIDPTTGFVNQYYEFFKYESMKKAKETVSKIMDIQYNEKNHDFEITISEKDFGLSNLDKIWVLHTKGIRSIYKDKKYHEYDCTEKMRELFRTYRVSKLEDIRNAENLNKPFYEQLFEIIQVLLKMHYYSIDLEEEYCLSPVKNKDKICFDSRTRKVDGLVNSAAVKTYLMCKKGMRDLQCIDEETLLVKRDEKGKHKDMWLAYLQTSVC

SEQ ID NO: 1590 - protein, 1159 aa, synthetic construct
  REGION 1..1159: note = Synthetic
VSPQMKTITIEARPMWETKRNLQPYVAEESMDMQRIAKYKEVKEVFDTYARKVIEIATQGVADENVLPTYEKLEDLFNQEKNAKTRALYKKACEDYKKLAASIIKKVADDFQLTKNFGKLFKEDSSAIYKNAALLGMKKEDLEVLGLYNNFSSFFTKYFTALSTTMCGVEHGSISFRIMENMERYWQNKQLVRAMEEDPELYMSIKDSIDKMNLEMCMTQDGIDAYNLLLGNTKNTGINSLLNEYAQKKHVRIKLLKPLYKIPLAKVEKQIVVNSIENDDELRVVVLDSLPVAENILDFAKRCLKLTFDDEIKDTTYIYNKNLHTVSYLMFGQFDLLERALKQVELTALEKEQSITSLSHMDAAMKLIEEEPRKSFADIIHDNMAEALKAEKKIPAIRKLCEEQANIKSERAKIKECYDSILFVRRAISMIYTDEVENSFIEDVVGMRDTCAVFNKTYNMVRNYCTKNPIQKKTNDMFFNKGSFLSSFDADKFKEGTSLSTLLRKDGMYYLYILNPAVSTKLSSLAYVEDGGYDRLVYKQISGLSKMFPKCFVSAKDAVERYGLTEEIREIVANKRYTKDANDRESCLKWIQYCMDSFMKNPVWTKYYHIPFKEAEAYESANDFYTRTERHTIYMDWAEHLDEDYVRKSVMDGSAFLFQLYNHDFSPYHTGKDGNYTRILKELFSEKNIHNLNDTDETALKLASGGARLSFRKASIPYKATHRANEELQNKNALNPKKTSKFTYDICKDRRFMSDKFILHIGVQIGFRNEETYTYNLNQIVNEQILKESPNVLTIRTGEEHLLYYMTTDAYGHILEQGDLNIIESQGEKLTMRKDFKEILQKREDEMQLAKEAWDYSIDIKDVKNGYVAYAVRAVLDIRDKYDAIIFLEDYSGDFVNKRRANVKAVYQQFQAALLNKLSNYVPAGKSYSETVQLSAPVSSLDDLKGQKGIVFFVSPSYTANVDRTSGFCNQYYDQFTYENMKKADAVCEKLDVQFDEKNREFLISLDDCIEPDKAWQLHTSGERSFWQNKKLAPFNCTEELADLMKDYHMSEFKEYKSVANKAFYERFFTIMRILLKMHYSDSVSGESYFLSPVTGYDTRSKKKGEPLNSSAEKTYLLMLKGIRDLNAINEETLLIARDEKGKHKENWLKAIRYNLIME

SEQ ID NO: 1591 - protein, 1244 aa, synthetic construct
  REGION 1..1244: note = Synthetic
LYAVKKSIQIGAIPTERTKKTLATMGIVEKDRQRVENISKFCQVFDRFHKERAGKILEETSFKTLPAYESAYDAYHKALVEKAEDADAIRDELVNRTDEVLKEISDAFLKNDSITELFTGDFLNKEMPALLTDKKEKKLAEELSKSAGGFIRYHQARSLLYSVKHGSIAFRLINDNYPFFYKNCEIIEKFRAVSGRTEEFLEGMRKLDWFRDSYLDEISDRDNYGSCFTQAAIDRYNVMLNGFTMPDRVKIKGLNEYINEYNHTLSAAEKREKGLRLLDPLYKLPLFNDNSFSVIPEKFETDGELLDTVDRIFNDTIYTKALGEAIDEACRLFDKDLGEYDASGIYIAPRQLTAFSLMAFDKWNAIEKLFNLDYDNKNYKKLVLDNPKANEDKYEKDRRNVLNRNIFSLEDIRKLALLDEEESGDAVEALCRNVREKKAEVLAAYNEYTEARKERKEKEEREEEVVSVRRDVRLRSAIKGLCDSIKEFERSLNFILSGRSLTETGLAGDADFINAFNELHDIIREYDAAYNKIRNFISRTKTKSDSVELLFGNSSFLGGWSDMSVKGGTFIKDGDKIFFVAASHGATKLLDDEYLTYEDGEETVEVMDYYLLADAAKSIGRIFIYNGMKNKDGGPAKYKYNPDAVPAKEYGLTEELFNAYAKGMHKSNYKENGFTDEDNRKTLDALTEYLGKAMPKYFTKLDFQLEKHYDTYRDICDDLKKKASFALSFKKVSKDYIQKLENNGDICLFRLWCKDFSEHSSGREGNYTVILKNLFNTDKDAVSTIRLSGNAALRFEKASLKKEDLVVHKAGTWVENKNPNSENRKRKLEYDIIKDRRFHHDRFRLMLPYALNYTEGDFCPVNEKVREDIKAGKFKYITSVKGGMDNLLWVCVTDLKGNIVEQFPINTIGNTDWREKISIRQQEMKEGNKNWTPGTDIRTLKEGYLSLAIKLVYDTIMKYESLVVLEDNAPNFKGNKFGIDTRLYEVFTEALRQKLRYAFSRTEGERDYGGVLKGFQLVNPEKPKGMQDGIIFLINPAYTSNIDPATGFISYIRPRYENITRTKNMIEKIDGFAVKNGMFCMDIDFSRFGDVLKGTRSEWTVWANGSRIIWKRDEDLAKGGKFVEISINEAFLDFFKKNRIDIKGDIKAQLLSNNSKAFYSEFCELFGALLKLSNGKNDDNFIISPVKNKKGQFFNSKTSDTVTCSDSNSAYNLCRKMAICVRNISNDVKKPVPKSEEFIKEIQG

SEQ ID NO: 1592 - protein, 1240 aa, synthetic construct
  REGION 1..1240: note = Synthetic
LFPVQKTLSFALLPVGNTLKTIQKAGFIEDAEKETQHRPVVVTAIDTFHRNALAGVLTSDSLRFPENDLWVRVIDAYRKRKEGDEGKARWDAAYHEVAQAFMDAMANHPLYELATAATPSRMIKEKILPAVEQGDPKTFDAVLYYTTRASLLQDYQIIRSKMYESTKKGTPAYRAINENMPRFESNIRNWKVVLEKLPGAQEAFDTVTAGLDLRGIPVEAFFDEASYGRFLSETHIAVYNALLNGWTDSETRHKGLRAYIHEAMQKDKTLKLPDLQKLHHQILSERETLSYVPAKATKDDDVWDAIASFFDGFHQADAAHVAYGVLEGLSGGVYDTSLVSIAARDVSFLSNQILGNWRSGKEALRDLAAQRWPKNKGKRDAFLKKERYSLDDLDAAFALCGYDGGIAAKLLADFERDAPLAGVAESEVRNLRDMKVSLSVGKEGNSMLASALQEAKKGYEVISILRCKDDKQSDPALLEDLEDVFAAWGAIIPVMNLARSWCTRKPYSDEKIRLSLGNTQLMGGWSWGKDGKNVNTKAAAFAWIDGQLHLLIRRLTARSSDRPKDDSDGKFDYTALTRGEGGVTLVVQDKLDCAKAFPKMLTGKESAKYITVPEEDIEAIRRGDHKVSKEHPVADMALVERMIGWMQELWDSHPSFKTIHFTKHAPAMYNSWNEFIEECDEHSYLMTTKEVSRKQIDDAVADGSLLCFRVYSKDLERMYKGYTVKYLPAIHLVDAVRGEHDTELCGFAAMYFRKKSIEKPVVHKKGTFVVNKRANDERRTPIPEKVWKEIYLFKNGRLERSKLSAEAVSWLESGKVVAKQVERDIVKDYSFTVDRFLLHVPVTMQRSCDPGTKDIEGLVNLRVDEAIKNGAGRNIIGINRGENNLLYVVVIGPDGRVLEQRSLNVIDGVDYAGRINDRVGTMREQQRRWEDMDRVTPIKDGYVANALPEIYRLILKYDALVAMEDLDMSFTSSRAQLGQTVYRKFENMLLDKLAYLVPDVVNAPHEALQLSPGSKATDKRGGVVYFVSPFATSGLDPKTGWLNLLPVYGADSAEKKRALFEKMDSVTRDKYGDWHFSFDYANYGIERAGIKTAWTVTSKGERLERTTDENGKDSVERVEISRLFDEAVGGDYEGDLKEKLASLRGTSLDTAVRALRLMLQTRNCLIGDVSGRYISPVEGAVKGFDSDNARDDEPLCTDAVTAFNLARKLRFLLQVQAQGEDIEILDGGRWLTMAQNFPLR

SEQ ID NO: 1593 - protein, 1234 aa, synthetic construct
  REGION 1..1234: note = Synthetic
LFPVSKTLAFNLIPVGRTLENMQKARVFDNAMILAKNYETFKSAADRLHKAFIEKTLSGFRLKYLSEGAKDSLQEYADIFFDSSVSAREKASLLTPVENALKESVAKAFAAVPGGKGSTMLKEMASAALLKELLPATELSDAEREAVAALSAYTTYTRPYFERRDAMYSAEEEGHTIPNRIIMDNLPLHLGNVRLAERLPEDILNTVNADPDLKPFINSLQAYDIREVFGVSMYALLTPQSAIDAYNTLIGGFTKEDGAKVKGINELINEYNQRGGNRLPKLAKLYKQILTERDTPSWVPESIQSDEEAVTVMRNLHKTLAELHYVTPDPAGWDLSRVWIRAERLSAFSHAVLGNWKTAENAIRKAIAADNPQKTREGMKGYRKRLDAIYNGNKAFSVSQVLDDVAFTRGTEMPSDERAALLRKGITDVIARALADADKSYGLLEAILAQGPLKEKLGQNGPEGRLGAGAHIKDCLDHLKDAVHTLAPFTDGKGVLDGDPVFYEGCYAPLSGFGDTLRPVYDTLRNYLTKKPFSTEKIELTFDNPNLLNGWDVSKLSDNRSLILRDGKKYYLGILSAKAKRLFSGDVPSDGETVEKGEVKFIPNPHMMLPKVAFPKKNTPPVPVTPLAANVRDKRVAIKDLTKNQSARMIDFFKEVIKSVPAWDVFGFRFKESDEYSRVSEFYEDVANQAYVMRYVPVSRAFVRKAVEDGSLYLFEISCQDMLEKHHGRDGKYKTLLQQALSGQPGSPVRLCGGGTIYYRKASLPRRITHPAGIPIPNKNPDNPKESRTLPYDLIKDRRYTEDRFAFHVPVLIHPSADRNGAGKINARVRDIIRENPGMYVLGINRGERNLLSIALTAPDGRIVEQRNLNVFDGFDYRRKIAEREKERQDDRRNWVGVRDIKDIKAGYLSRAVGEIAAIVRKHGCIVALERLNADFKNSRSAFEVNIYEQFERDLVNRLSLLTDKDNGNDTEKALQLTNPGKTEIERTAYPQNGIILFVNPAYITTTDPLTGFVNRFDTAYSSIAECEALTDKMESFRFDARSGNFVIEFDYGKVAPERSLPLSRKHWTIETFGERVENIRDFSVNPKGIWVDKVTELTPAMKTLLSDNGVAWQDGGEIAPRLKGKGADFWKELLRLVRLTCQTANWYSDRREWRLVGCTRDGSGRIYDSRTALQNRPMDADVNAAWNLARKAHLVLKHIREFVPGETVDPDGKAVKAPSVVVTDEEWFAAVQQ

SEQ ID NO: 1594 - protein, 1220 aa, synthetic construct
  REGION 1..1220: note = Synthetic
LFPVSKTLSFRLVPVGNTLDTVQRNRVVEEAEQLKKDYEVLKSAADRVHKRFIEDALSQLHLKYMGDGNYDSIQEYAKAYYDNDEDALAACAEGLKFSISNAFGNIKYDDKKSMLAAFASELLVKEILPKETLSEEEVAAVERMKNYTTFMRPYFTIRERIYDAGEKGFTIPSRVIDENLPIHLRNVKCFALLPDAEREKLASLFAVFSGKLKWAYELADVFTVSAASCLSAQSAIDVYNSLIGGIGLEDGKRIKGINEIINLYNQANANTEGFRKLPKLEQLRKQILSDRESPSWLPDAFENDREVLDAIVQLNEELHVKVPVAEFQKKTSQALPDAVLISIAKLSDYSHSCTGRWDEFERCIKLWLKEQNPPKAKEKENNYNERINKLYSKTSSISVRDLYDAVSKHNTSEQTPDYLDRYILDNVISPLVKADADFSVMMDYIGSMGPDDKLGQTRRDEKENVRTYIRTWLDDLMDARRGVEVFAVGNGTVMPDPGFYETIVEPLNQFGKVLVPLYNKIRNYLTKKPYSADKVRLYFGTPSLLSGWDRNKEKDSRGILLQDNKSKYIAILPAYAKKLFEDERAYDEGSDMKRLSLKFIPGPFKMLPKVGFSAKGIPFYQPSKEVLELHDSKKAVKDYTRSEVTLMVDYYKHLLTANPEWADIHFDLKPSEEYATLNEFYIDVERQAYDMTWKGVSRPFIERAVERGELYLFKLDCMDMSEHHYGLDSNPTAILNEAFSKRNATDTAIRISGGAAIYFRKASLPAHVTHPKNVPMKNKNPRSKNATRTLPYDLIKDRRFTEDQFNIHIPFLLGPGNDKMGENNVNAAVKDIIKANPDMYVLGINRGERNLLSIAVTAPDGRIVEQRHLNVFDNFDYREKLASVEVERQQARRDWNAIDNIKNIKKGYLSRAIGEIVRLVKKYNCVIALENLDMEFKRGRQQFEKNVYQQFERDLVNRLSMLMDKRDEDRTRSTIQLATSGKTPEERTRFPQNGIIFFMNPSWITKTDPLTGFVNRLNTFYTSNEKTQQLLDTFDSFRFVPEENMFALTFRYGETTPNKPAGSDRQWTVYTHGRRSKFERDSNEFQNVDVTSEMEKAFIAEGIDYKDGNELLPTMKGRGASFYRAFLDVLRLTLQNTVYDGKELKIASCTKDVYGNFFEATEKNVTDGFPCDADINAAWNIARKCHMVLQNIRTYAPVEKGSKGPQLVVADKDWFLEVQK

SEQ ID NO: 1595 - protein, 1184 aa, synthetic construct
  REGION 1..1184: note = Synthetic
GYTVNKTLSVGLRPVGKTRENIEQYKLLEKDKERAKAFLRVKKYLTKVHGIYIEDRLTAYSFEPEEVKNLWNLYDAWKHAEKKDRKAAKKEYEKAQEDARKKIAKFLTADTMYSKLFKAEVLTDVLPGYFSGVQETADIKLFVGFFTYFGNYNIAKRKMYDYNDKGTVSYRVVNDNLTLFFDNQNILSAIKNYPELYKENAFQKLEKIYADTFKASSAFIGEYNLCISGVFDEEGNNIEKGVNQLINEYCALNKGVRIAYLKPLYKNILSEKKPLFTVDVFETTEEVTDEVKTFEESIEKPYGKFVSYINSGSYSYSGIYIAKKNLNTFSHFISGDPFIVEYAVKDKYKKEYGERDCFSISEIIESVKEYNEINEKTAECNFERYFNVVKTFKPELYFSKIPFEKITDLQFDKTQAVELKEYLQTLLDHYNTVRMVKVYSQDDDNYKPDEKFYFELDTLIDAYKPIVKLYNKIRNFVTKKLSSEKSIKMNFDCPQLLDGWDYAVEKTKNGMMFYDSENDVYYLGIYNAKTKKPDFKICEDSKFKKMYLKMIPEPYKMLPHVCFSQKGIETFKPSEEILEGYKKGLHKKGPDFDINFCHKLIDFYKDCIAKREEWNVFNFKFSPTETYADTSAFFEELSKDAYNVELHGIDRAKLDAAVEEGSVYLFELYNKHLDKKAHGKNLYTQIIRSLFDKNCNNIQLCAGAEIFWRPALIKKNITHPKGSVIVNKVSKEGFTIENEVWFNIYKYLNHFTDHLTPEAKTLLDSGSVVYKNADRDLIKDRRYTEENFSLHFPVKINQKAGDMFAYEFNKKVLETVRNDKTVNILSINRGENNLIYAVLMNRNGEVIFDKSFNLIESGKQNVNYKNKLVVKSKERNAARTNWQEIDGIKDLKKGYLSCVVAEIARLIVKNNAILVMESLDTTFKSSRQYIESNVYQQFEAAILDKLSCLILKENDADSAGGLYHPYQLVPKFQSFEKIFLQWGFVFFVNSAYISKIDPANGIANIFNFAELTNNEKRINFFKKMDSIKIENNHINFEYNLEGDFKGKQTVSAIGERNVWNPKEKTFERISLEKIAEELSDKNGNETDLLSYIKNEKPLPAFTEKLLKAFIATVSFKTFTLDEWTYVSPDNKNNQFTGKSMDYIGAYNLGNKFRIMLERDDGDGFLNNIKASEYFAELLNIIQKN

SEQ ID NO: 1596 - protein, 1228 aa, synthetic construct
  REGION 1..1228: note = Synthetic
LYPVTKTLRFRLLPQGRTEENMQAAKVLENDLERSEAAAVVKGLIKKYHLQFISDTLSGSTLSWQALTETLDKFKADHTATAELDSTLAAYRCKLAELFTKSPKYKVMATPVSIIKEILKTETDPENIAALNKLNGYTYIIFDYVSTRMLTYSADAKATSLAYRLVDENYLRFYQDISAAAEISAVLEEAGLDNAEVEAFIRTDYNTCLTSEGIASFNAAAGSINQFVNVLLQQNPVLQSEPALRRHLQPLYKMLLDEAESKIIKFEDYGQLRDAVENFRRNFQDLPQSLIDIFAGRYDYSKIYVGYKYLNEASSQIAGGYNWKLLENALEDFYSKPYLVNGKMPVKYKTVVNKKMNQLAYSFTELQEALDAGESGSSITDLFGKYAELHAAYAAADGNVFYKEYDRKSIASLKNYLDAVNAIARFIKIFAVPEVYAKDEGFYGIVDGAADKLRDFDLLYNMVRNYITKKPYKKTKVALTFNSSSFGRGWDENKIYDELTTIFTYNGKYYLGVINKNDKPDLAAAVSKDEGGYKRMVYKTFDIVKQLPRLSFTKAVKAHFAESDEDFIFDGPKFAKPLRVPKEIYLQSFTDNGDKLPDSAKKYTKAYLDMSGDYKGYYEAIVKRIDYTKEFLSAYKSTSIYDLAFLKPADQYEQWSNFTDDVQTALYKIRWDNIPAAAIDEMVESGKLYLFEIYSADLYKNPAEGRKIDTQAQIFKEIFSENGQKVIKLLGNCEVYFRPASLPAVVTHPKGSILVNKQLVNGKTLPDEVYREIYRYLNKKSENLSPLAKQLLDKELVKYRVAQEDIIKDKRFTENQYSFHLPVTLNYKVKQQFYINMEVMNMLRSRKDINILGINRGTRNLLYVTVINQQGEILYSRSLNEFNGVDYRDKLLVKERGIKDAAMNWQAADSIKNIKEGYLSRALGEIVRLMVKFNAICVVENLSSNFRNAGGGIFAYGNFYKGFETNLIKKLNCLIIKDAEKDKAGSVLRSLQMTRSFESFEKAGRQSGWLFMLDPAYISAVDPLTGFVNLFSFRNLKTIRQKAEFLQKFKSINYVPETKAFDFVFDYKDFGVTACGPVSCWVATSDVERIVKTTENGKVKFESVLPSMQLAKLFTDKDIDFTDGHNLISEITADSRLVTETLSIFMNIMRLYNYDIDRNNDYVSSPVMGRFDTRYDKKLHNPDELAAYNMARKGLMIIKRAQASEKDSKVDLFIKNADWFSFLQTGSI

SEQ ID NO: 1597 - protein, 1230 aa, synthetic construct
  REGION 1..1230: note = Synthetic
FYPLAKTLPVKLTPMGSTLQNIRVNGIIKNDEELLENFTRLKQLADEYHKEFIATVLENFKFKVASEGNNDSLSEFAEAFDSDRKQDADARFRFTIIRTCLRLAVAKAFEAMPDFKKLEKKEFVKDILRQRATGDDVPIIDSFSKFTTYMLSYNRTRRIYGYDEKANTVAYRCVDENLPIFYNNIKAFAKIREHLPQDIMNTLCEEMKPYLKSDELAEMFTLGYFNECLSQKGIEAYNAVLGGINTPNGHIKGLKEYIYLYNKETKEKKFYLPSLTSLKKQILSDHDSLSWIDTKYKNSHEMLQDIRTFHETYRKNVAHPLQALMAHIHEYDLHRIYIANKENLAPISLRLYAQWNALRDTIFNEYSAKIQRKRKETFEKYEKRVNKAIDDCGSFSLAEVNRFLMPFDKNVADYFTKMGAVDNHKEQRENLFATIENKWTDLLSLMEQDEKYEKVLQLTEHHITKIKAYLDAVRDLHHFVLPLQGEGNENDREPVFYDTLGNCLEVLQEIKYLYNRVRAFLTRKPFSTKKLKLNFGSSTLLSGWNTDNEKANRCTMLRKDGRNYLVIFEKGQGELFQDESMTLSKDEPYYEKFDFNIFGDPVKSLPHTCFAACNADFYKPSAEILQIREKGSYKAGKNFNLPDLHKMIDFYKACVKKMPKWGEVQFNWKETTEYENLTEFMESFIVKGYFIDFLKVSERTVNKWVDEGRIYLFRLDKRDYSPFSKGKKSLHTMYLDMLFHPDNLEKMVYKLSGGCEMFFRKASIKPSGPTHPAGQPIANKSPEVAEKKPVSTFAYHLIKDKRYTEDMFMIHLPVAVNYHVPDSKGMKVTAQVRHLIRQGLFKHVIGIHRGERNLLYVTVTDMQGHIVEQKSLNVIEDSYAGVTHAKDYNELLHRKGEQRTQSRKDWQTIDKIRDIKQGYLSQAINVITNMILQYEALVVLESLDDCFKRGRQKIEKNIYARFEQQLVDKLNFLVKKDRDLNEPGGLLNALQLTDRVEPGYKAFQNGIIFYVPAAYTANACPVTGFVNLFNFKKGSIEETKAFFSKFDGIRFNKQTGEFDFTFDYVNFTDKAEGIQTEWTMSSHGCRSHWTDIAGRKICKMVELTEEFKNLFIGHGVDFTGNLKEAIATVNKRSFYEGLSDLFNLLLQMRNVVPGVCDYFVSPVKDREGKYFISTPEHEHLPSDTDAVTAYNIARKGLLMVDSIATTHESDKLSLGVTNQIWMNHIQNQDN

SEQ ID NO: 1598 - protein, 1140 aa, synthetic construct
  REGION 1..1140: note = Synthetic
LYPIEKTVCFELRPIGNTLEHFYKNEIIEKAQNRSDEFREIKHLIDPIHKEIIEECFQELSENSEFTRLLEKYEFKPHVINSKKPLPRDKKLIEENIYNKKEIVEIVKDTFRHNPKYKLIFSDKKIDMLKEYYKDDCEKFELISHFEEFASYFEKYDIKLKNIYGCEGKISNTCKSILNRLITDNLPIFYFNTKKNILTKVKFSASFENVKYIDKFASYFSISGIEKYNKIIGNINDAVNKLNQKGKKYSYLGKMKDIFDLDQYSDIVKKISDDKELVEIINIFIDGQDIEELKNTFSNLNDKYNLKKIFVRRGKELDDLLKRIDFKGRARLTTSYVNLFYIDSINRNKVKIYEAISVKINELVDDYIKKYEDVKYILTAKYDSGTKILGQNDKNIAKIKELLESIKAIYDFVSIFIPKKAENRDNIDYEKVNFDIYNKINFERLSIINQIFNHFKDYFTLKNFSTKKIRLNFNVEQLLNTWDIDKIDETLGTILLKEEEEKTKYYLGILNSSNYSKFEYTDVKENNYRQMIYTSQSEEEKNKNYKISFKYINSAKIDEMVEKDEMYLFQIYNKDFSSYSNGNYKLNTMYWNNIFDSNNIENIIFNIAGGATIFFRAKSLERRETHKQGEVLSNKNKDNQKTTSIFSYPLIKNKRYTEDKIKLHVPIEINCNSKNLNQRKLNYRVNKNIQNLKEVNIIGISRGTNDLLYATVINSKGEIIEQTSLGKIKNVVFDKSINATREIISDYNKIIDTKEKERENANNRNKTGEELNLEKSIKDIKNGYISQAVNVIANLVKKYNAIIVFEDLNDKKSEKIESKIEKSIYRNIQNAVITKLSYLVDKKKKDKFAEGSILNGYQLTYYCEQDLVEKQEDSEEKQNGIVFYVSTYMTTNIDPKTGFVNCFSVSLPKSIDGVKDFLEKFKEIKFNTKEGYYEFVVNYENISKYTRYFIGEKLSKKEWVICSYGDRIEESKDINTGKTKYKKIDLTKEFKCLFEKFNIGQGKKLKTNIIKFLENLDLGSGLQAKIKGTNRFINKQSIQQEEFCREFMRLFALILKLQNSDGKESYIISPVKDSDGKFFDSRKHNEYSSIVPENEISNSAYNIARKGLLIINRIKKTKELERIDLNLRDEYWLNFVQNNN

SEQ ID NO: 1599 - protein, 470 aa, synthetic construct
  REGION 1..470: note = Synthetic
MKIPYQLEDKSQKELLLKYIKNYNSIYNLTFNFVLDNLRNGIKVESKDVLKFFKTKNNILLDTRFQTSSYYNVKEIITRLKNSGQLDKKIIFGGKKLFLERCKNKITSEEFKLKKLIPLYSVGQAFYSGNVKFQILSKNCILFKPSRDSHFNLKISLKKRNKYNSYLKKLIELQEQKRIPITYSLDLEFIYIRFEHTAIKIPKKTRKIKNRIFAIDMNPNEIGYSIIDWKNDSEFKLVKAGSVSLKSLLDEEKNYNVSPDSKIAKYFVDKRQYETYKVAHFLTRKANQYKCEIFALENLSINSKNYEKGRKLNRLINNQWNRNKLVNIIRKQCDYFGLYFHEAAPDYSSFIGNMLYRKLNLPDYCLASIEISRRAYEFYNQYITKTKKKEKNIVFLEKSKVEDLISQSLEELGIDETWNDLKELYYKLKSRKCSYRVQIHNSMILREIFNRKALIRHRNFFIKSGKFKIF

SEQ ID NO: 1600 - protein, 457 aa, synthetic construct
  REGION 1..457: note = Synthetic
MKIKYRTETKEDSDRIFQMMVNYNNIVKCTYNYLLKHPKASTAEISHYQNSLNNIFLDTHFKGSAIYEAKGLINRIGENKLIFGGKKLFIQRCQNKITKEEFHKQKQIPIYRVGQSNKKGNTKFSIITEECILFKPNKNEHILLTLESVGKNYQKRLLELSELANQNKIAIDFKLDTEYVYISFDLNKLKSEKVISDKIKDRYFSIDLNPNYIGYTVIDWIDGQNYKIVDKGCFSLKKLNDYDDFLNGKGFSSESKERKYISNKRKYETINISHKLVKIAEHYKCEYFIMEDLVISSKDNKKGKKFNKKCNNQWDRNLIVSQIKKVCKLSKIKVLEVAPNYSSFIGNLVYRKEQLFDPCLSSIEISRRGYEFVHQYIIKDKEIEKNIIFGNFEKDKEVYEQSLEELGVNFPFETFQELYSQIKESKVRYRFPLESCKNLAVFSKNSIRDYQTLYKFI

SEQ ID NO: 1601 - protein, 455 aa, synthetic construct
  REGION 1..455: note = Synthetic
LKISHNPDNFELLRQYQYDYSKLLRFTYNRVKDCNNLLSQKELRDKQLEMNNQPLDSYFMNYAQYEARAMHASDKASSSNSRVFGGLLNNQRRSKKLISKEEYIENRLLPITCIGNATNNGNCKVQIIDSQTILFKPTKKDHIFLHLKGLSKNYKNYIEQLILHQEKKDLPITYKIDQNYVYISFDLNKLEPVIDERIWKKDRIFAIDLNPNYIGYTVCDWKDSSNFKIQASGSFSLKFLNDKDYELKKKHTPSTDPEKIYYTNKRKYEIIQICKKLITLAVHYQCESFVMEDLSIASKDNGKGRHLNKLINTQWCRNLFQNQIRKRCSLNWIELFEVAPNYSSFVGNLAYRSLHLPDYCLSSIEIGRRGYEFNHQYKLKNKDKKKNIILNTDPEVLKAMILSLEELGYSCKSESILELYDEVKKSGLQYRFQLADCNAVFSKFYLKRLWEFNSF

SEQ ID NO: 1602 - protein, 455 aa, synthetic construct
  REGION 1..455: note = Synthetic
LKISYSTDEESLKYIYHVQNDFNKVLRVTYNRICENSEYSTKELTAIQANLNNIDGCKSHLKNSAIYKSREIYTINKASNPQKVIFGGRKSFIDRCKHKISKDEFSKKRMFPIYAIGQCNCHGNRLFKIVDTHTIIFKSDMEHHIKLTLKNVGKNREKQLLKLIELQKANSISLTYELDLDHVYIIFDNSIFENHRYQIKKDRTMQIDVNPNYVGWSVTDWKQDYNFHLVASGMFSLKPLNDYENHLAVSSISNESKYITNKRKHEVIEIAKELFKLCKHYRCEVFAIEDLCMKSSSLNKGKKLNRLINGQWCRNLLFQQIRNRVLSSSTTLVEVQPQYSSIIGNLVNRHLELPDPVLTSIEIGRRGHEFSCQYIFKRRQPEKTVVFPKLETVKKSITQSLEELGIDVPEFINWNELLSVVKKSKVKYRFPLLSKYESTPFSKNHKWRYLTIYEF

SEQ ID NO: 1603 - protein, 459 aa, synthetic construct
  REGION 1..459: note = Synthetic
WKIKYSCSDEDLSIILDYIKAYNPVLRYTYNRYVENSKIDTKELYELQKTINKSGLIKSYLMNCCIYDSKSLYGENGDKVIFGGRANFINRCQHKIDKETFQFNRLVPLYCVGESSKYGNRFFTIVDKNTIMFKPSSKTHINLTLSGLGRKRTKDIEQLIKLQNSKAIPITYKLSTEYIYVSFDYSKIKEYKYTTISNRVMGIDLNPNYLGWVVIDWLGENKYNIIKAGSFSLKPLNDYQKKCHKSSDDKVTTYINNKRKHEICEISKQLFTICKHFKCETFSIEDLDMLTATKDKKTRSYRRLVNNQWCRKLFFNQIKKHINASSTLFLPIKPNYSSFVGNLLYRNTRLPDECLASIEISRRGFEFANQYIYKRQSQKKNIIFPSLELEDNKHQLALSLEELDVGVSNFEDNWAKLFSEIKKSKVKYRFSLEDAVKYYSSTLFSKNYKNRYIILNVFI

SEQ ID NO: 1604 - protein, 459 aa, synthetic construct
  REGION 1..459: note = Synthetic
YKIPYSCENLNEILPYIKQYNSVLRFTYNRRLDNHDLDLSEKEFDKFIRGCQNQMNNVELIGSHLKNSANIDAKGLIEKYELDPIIFGGKNLFLQRCNDKISKEEFKRERLSPLYSVGEATNYGNRMFQLLDLETVLFKPSKQKHFTLKLHSIGQKRLETLKRLIVLQNTKSIPITYSLDMNYVYITFDMNRLNHQEYNVIQNRVIAIDVNPNYVGYSVVDWKSSKEYQIIDSGFYEIKPLNDYRWSKKVTSDDPHAIYVTNKRKHELIHIAIELATKAKHYKCEVFAMEDLTIPSSDTKKGRKYNRLVNNSWNRNLLLNQIKKHINCSSTTLIEIDPAYTSKIGNILYRKEYLIDACLASIEIGRRGLEFFSQYISKRKPKEKIVIFPDLSSVKSILIQSLEELNMCNEFESWKDFTSLVKDSKARYRVSYLESLSKYSGVLFRKFHKRKFIYTYVYL

SEQ ID NO: 1605 - protein, 437 aa, synthetic construct
  REGION 1..437: note = Synthetic
IKLPIYLSKKDKKIILKYQKNQNNVIRFTYNRLVEFGALSTKEVTVLQKTMNNVFVDSHFLNSAGYKAKEIYSTQKETRETVVFGGKKLFIKRCQKKISAEAFRLERLLPLISIGEANYKANRKFLLQENNTILFKPEKSCHLTLGLPKLRNNIKKELKLLLELQNLKQIPITYQLSMDYVWISFDDKILHTELNYKPVESRFMAIDMNPNYIGFVITQYENEVSTILKSGVFDLSKISAIPEKRNFETTHVAIELVKIFKANHCKVFGIENLNMKTKDHKKGKKFNKLVNNGWARNCLVNQIKKRIDRIKGTKFLEISPEYSSFVGNMLYRDTTYPDMVLSAIEINRRSYEFYTQYVIKSRPIIKNIIFPIWENILDPLAISLEEFGFRIDDFSGWLDLYTYCKNSKLKYRVPLDAKASRVFSLNSTKSKVFYYAL

SEQ ID NO: 1606 - protein, 449 aa, synthetic construct
  REGION 1..449: note = Synthetic
IKLPYETDEISKIEIERYIKNYNSVLRFTYNRLLDYEFKLSTREITTLQKTMKNVFIDSHFLNSAQQEAKQLKGKDKVIFGGKFNFLQRCRGKISQEEFQRNRLVPIYSIGEADKLGNRKFRILSENTIRFQPCKKVHCELKLPNLRNNLKSDIQQLLKLQNCRKMPITYKLSSDCIYIIFEENFLNEFVYADKVENRVFSIDLNPNYIGWSVVDWADAETYTVVDSGVVSIKQINDADCAIHEASNSSRRQYISNKRTFENTDTAKYLADTALHYQCQLFSIEKLEIKTKDNKLGKRYNRLVNNQWNRFIFYTRLQKYCDRYGIRFQEVVANYSSFEGNLIYRETGLPDMCLSSIELGRRAYEFYHQYVVKDKPKESNIMIDTSSKAHDRIVQSLEELHYDLVFDSIISLYNQIKTRNLKYRVQLEDSILTAVSSKKSIKSKVLLYSS

SEQ ID NO: 1607 - protein, 494 aa, synthetic construct
  REGION 1..494: note = Synthetic
IKLPYTSSKSNKEIILKLMKQQSNCTHHIFNKIKDSKNSLEQKDLTITVNSMNNIDDIDSWFKQSAIFTANAKYRAFKENVKQVEDYNKKNPGNKKRTPNSVVFGGKKLFISRALRKIKRKDFKLMRLDPLVSVGEASKEGNRKYVLDVIENNLIMFYPDRHTEIEIRLPKLRKNYKNDLYRIQNLVENKKIPIQIGIDLSHIYISYDESNLSETICCPIDRRFMAIDMNPNEIGYSIIDWVDDNNFNVIATGILSIKEINDRQLKLKVPSDDPKNIYLNNKREHEIFEVSKELIEIAKHYRVSAFGLENLDLFSRDYTKGKKCNRLIDNFWAYSRFSKNLTKRLILNNLKYYEVPAAYSSFIGNLTYSNYPDPVAASIEINRRVYLSFLKDVSVKPRVKSHGLKRTKIKFRPMKIAIFPEFKEVKNALIYTLEVMNKRPLKFLTDSDSWKELYSKVKSSKLRYRVSLDLVRSKVFSLGNRASLVQCVGCFSII

SEQ ID NO: 1608 - protein, 474 aa, synthetic construct
  REGION 1..474: note = Synthetic
IKLPYSVSNANKDMILALIKQQNSAIKYLFNRIQDSPEPLTQKELTALTHKINHTEIIDSWFKQSAVYKAQSINGSYKTKIKEILEYNEENLGAKRKLPSVVFGGRNLFFKRSEKKIKKSEYVLEKLIPLCSIGQSINYGNRKFRLKIIENNFIIFQPNKEMKIKLILPHLRKNYSKILSKLQELTENKKIPVQFEIDLKFIHITYDENLFQSSVYNPIPNRYMAIDLNPNYVGYSIIDWKSETENKIIKTGIISIKNINDSQKSVHKSSNSPENLYWNNKREHEVFQISKELVSIAKKHQIERFGLEDLSMKSCDKGRGKNFNRLLNNLWSQEKFSANLIKRLNLSGIKPIKIMAQYSSFVGNMLNQNYPDPVASSIEINRRVYKYYHRIDFKDPVIFPSFKGCKSALVKSLEEIDERLIKLLQDSKDWKDFYYRVKNSGLKYRVPLDRFRYKVFRLFHGKSLISQFLDFSMI

SEQ ID NO: 1609 - protein, 396 aa, synthetic construct
  REGION 1..396: note = Synthetic
MNNIFIDTWFKQCAIYKAKQLNDQDEIIFGGRKLFLERNSKKISREEFQIKKLLPLYVIGEAGRYGNRKFNFDFIENNKLVFKPDVKTKIDIQLPKLRKNYRKILYKLEELSNNKKLPITVSLDLDYVYITYDEYHLKIEDIKIKNRIMSLDLNPNYIGYSIIDWKSEDENTVIKTGCISIKELNDKQFDLKKLKVSTEDKRMKFLVNKRHFEIFEISKYITNLARHYKIESFGIEDLTIKSSDKEKGIRFNRLTNNLWNRNKLIQNLEKRLNIYGIRLYKIWPQYSSFIGNILNRNYFDPIASSIEINRRTFKFSNKLKPVVFPEFKKLSNVISKSLEEFGNGLIKLGTCKHWVDLYKQVVKNSKLRYRVSLDLKKTKVCRLFNRKSLLYEFISN

SEQ ID NO: 1610 - protein, 477 aa, synthetic construct
  REGION 1..477: note = Synthetic
IKLPYQTSQEDKNIIFKYQKNQNNIIKFIFNRFKDAGAEVSGIEIRKQIKDLNNIFIDSWMIESSIFKARELFSSSKENNSKVIFGGRKLFLQRCQNKITKQEFQFKKISPLYLVGERLQKGNRKVALDIKNNKILLKFNRETHIELTLPNLKKNLKQKLFRLEELMNKKLIPMTFSINQEFLYLSFEEIQNSDIIKISKKQNRIMALDLNPNFIGFSILDWVNEEKFNIVKTGMISVKEINDKEFNIKNLKYELKKQEVSGEARKQIFNKKYSHIKNKRKHEIVEVAKQLYNIAKSHNIEYFSIEELNIKPRDNQKGRRYNRLINNNWNRNLLEQQLEKRLKIIDIKMLRILPQYSSVIGNLVYRNLRLPDPILSSIEINRRTFKFVGKFIKKVNSYDRIVLPSFKSLRKIVSISLEEIGYKLKSTILNWKDLNDWMKEIKTLNLRYRVSLAEAKPPASVLSLKSSKSLVKVFEFC

SEQ ID NO: 1611 - protein, 479 aa, synthetic construct
  REGION 1..479: note = Synthetic
IKLKYKTDEESSARIQEYRRQYSSVFKVYFNRLSEGMSSKEILHLELNNVELINSGFKGSALQEARGLLITYQAKKGPLKRKNESEKHYQKRLKEFEHSKNHLIFSGRKSFLDRIKGNISREELKERRLQKLCSIGQCASRGNGLFSVQEDFNILFKPTRKEHIILEVLDSQKKRYSRELKAIYIKSFLEKKYPVTYHLDSEFVYLTFDETILKNENKELEFIPNRIMALDLNPNYIGWSIVDWKNSSEFKVVKSGIYNFKSLNDKEKELKNLKLSPEHPKRKYLNNKRRTEVFEVSKNLINKALYYKCQIFSVEDLNIQTKDSGLGKNFNKLVNNQWIRTDLVSNLEKRCNIFGIKFIKSKPEYSSFIGNFLYRSLELPDMILASIEIGRRAFEFYNQYITKKFEIRKNIVRPSLVDFRTLYLKSLEEFELQPVYKDLIELYYFFKKSKLLYRLSLDKFSLEFSRCFSIKSQLSSILI

SEQ ID NO: 1612 - protein, 336 aa, synthetic construct
  REGION 1..336: note = Synthetic
MFSIQEDFNILFKPSKKEHIVLEVLDSQKKRYSRELKAIYIKSFLEKKYPITYHLDSEFVYLTFDETILKNENRELEVIPNRVMALDLNPNYIGWSIVDWVSSSKFKVIKSGIYSFKNLNDKEKEFKDLKLNSSHPKRKYISNKRRTEVFEVSKNLINKALYYKCQIFSIEDLNIQSKDSGLGKNFNKLVNNQWIRNDLVSNLEKRCNIFGIKFIKSKPEYSSFIGNFLYRSLNLPDMILASIEIGRRAFEFYNQYITKKFEIRKNIVRPSLVDFRELYLKSLEEFELQPVYKDLIELYYFFKKSKMLYRLSLDKFNLEFSSCFSIKSQLSHISFR

SEQ ID NO: 1613 - protein, 460 aa, synthetic construct
  REGION 1..460: note = Synthetic
LKLKYSCEDSCDQDLILKYMKQYTHVFRVAYNKLYNQEKVKQVDLLKLNHIDLLDSWWIASAMIDAKMLYNRFKTKKIIFGGKKNFLKRCKHQIDKETFNLNRLSGLSSIGEKKSGTKSVHGNRKFKLTTDLKQVTLKLKDKKINLNLIGNYSKNLLYKLSQVYKHQISDDTPLTYKIDTNYIYITFDESTVLSSKLNLTYVTTNRVLSLDLNPNYIGWSITDWKSSSEFNVIKSGVYSFKNITDKIQDLKGKGFNSESEIRKHLNNKLEYETYQVVKNIIKKAIYYKVQLIGIEDLSIKSKNLSKGRYLNGLINNKWLRNKFSTCLEKYCNIYGFKFQKVKPEYSSFIGNFLFRSLNLPDMVLSSIEIGRRTYEFYNQYITKLNKIQKNIIQPNLKDFNSLCIKSLEEFNMQNTEFKDLKDLYYIFKNSKLTYRVPIPSNVQVFRFNSIKSAISIIYYN

SEQ ID NO: 1614 - protein, 438 aa, synthetic construct
  REGION 1..438: note = Synthetic
MSYKQCRDIAASLNNVELLDSWMRVCALGKAQNKLLISRDVIFGGKKNFIARCQNKISKEEYKKNRISGLLIYGETSHYHGNRKFRIQDDLKSILFKPNRKTHIYLKLPELKKNYEKILKKLCRHADIDDMPLTFKLDQKYVYITFDENKLFDDKIEHKVKKNRVLAIDMNPNYIGWSIVDWKNERDFEVIKTGCYSFKKLNDKQFALKLTKKQREELSRKERLELVSKAKVKNVYFNSKRKHEIIEVAKDLMNAAKNYHCEMIVCEDLNIKSQDRSKGKNLNRLCNSFFIRNTFVNNLNKRCNIDGMKFFKVIPQYSSFIGNFLYRRLNLPDPILASIEIGRRGYEFNVQYVEKTKEKSKNIIQPNLKKFDDLIAKSLEEFSIKESFKDLISLYYVFKKDSKMMYRVPFRNNSKWSKFKNMKSQLSRLDFSLSSLCF

SEQ ID NO: 1615 - protein, 460 aa, synthetic construct
  REGION 1..460: note = Synthetic
LKLKYEASDEAKAFIRECRRQYSSALRFAYNRAIDGWNGKQIRDAIKFELNNVGLMDSYMAACVEQDATSKCKSVKESDNPDAKYIFGGRKNFIRRCKGLITKEAFDDKRLSPLLVVGEANLKANRKFAINEDLRSILFKINKNSHYQLNLIGVYGKRKQILSKLYELQCAKATPITYKLDSEYVYLSFDETKVEHYKRDNAIKNRVMAIDMNPNYIGWSIVDWKGENEFSIVKQGVFSIKQINDIAQQLSKSKTDSSDPKKTYIENKRVHETYEVSKKLIRICLHYRCEMFAIEDLDIRGKDSGRGHGYNRLVNNNWCRNSLELNLQKRCNIFDIKFLKVKPNYSSFVGNFVFRRLNLPDMVLASIEIGRRGYEYNLQYIEKKKDIKRNIMFPDSEAYRASISKSLEEFGLDDGVSLLEAYDALKKSGTRYRLSFDQCGTRFSRCFSKASLILKSLNGF

SEQ ID NO: 1616 - protein, 458 aa, synthetic construct
  REGION 1..458: note = Synthetic
LKIKYHTNKEEDLKLIRQYQKQYSNTLRWMYNRCVDGIGDTKRKQLAKTTLNNIPLMECWFISSASKDANAKYIADPQKRIIFGGKKNFIRRCKGLITKEEWQKCKLMPLCSIGEANQKGNRKFKLSEDLSKITFKPNANTHIELIFNGLGKNYRKTLRQLYLLQESKATPITYYLDDEYVFISFDEVKMQITDKRQVIENRIMAIDLNPNYIGWSIVDWNENGKYNVVKYGVYSIKDINDKEFNLKNLPSNDKRKVYLSNKRNYEVMQISKNLINKALYYGCETFVCEGLTIDSSDKGKGKKFNRLCNNLWCRDKLVNNLKKRCNLFNITFNEVKPEYSSFVGNILYRKHKLPDMVLASIEIGRRGYEFTRQYIKKDKEINKNIILPEIKDFVEDYLKSLEEFGVIEKSIKMVDLYYLLKKSKIRYRFSLDDWLNEPNSLKFLRCFSKRSLILKISN

SEQ ID NO: 1617 - protein, 446 aa, synthetic construct
  REGION 1..446: note = Synthetic
LKFKYSVENEEINNRISSFQRQYSSCLHFFFNRYVENQKVSEIELRNLSKSLNHIELLDSWFIQCSIKEAKQLYENRKSLNSLDDSKKFKLIFGGKNLFSKRTKGLISKEEFKNQRLNPLYSIGEADKISNRKFRIQSSLDEICFQPNRKEHFILKLKGVKGNRLFTLKKLYELQCKKDITISYKLSKEHLYLSFEEEKLSTFKSKKIENRILALDLNPNYIGWSIIDWKSSNEFNVVSKGVFNLSRLNKKTSNKKKFENLEISKNLISKAIHYQCSIVSMENLSIESSDKGKGKFFNKLCNNDWLRTALRNNLLKRCNLFGIKFLEVRPEYSSFIGNFLFRNLNLPDMILASIELSRRAFEFYNQYISKKLKIQKNIIQPNLLDFKILYVKSLEEFGLQDVYKDLVELYYFLKKSKIMYRLSVQPWSEQFSRCFSRQSLVFKLEI

SEQ ID NO: 1618 - protein, 385 aa, synthetic construct
  REGION 1..385: note = Synthetic
MFQCCIKEAKQIYSKHKTNKVIFGGKANFFNRLKSKISKEEYKANRLSPIYSIGEESKKGNRLFRIQNDMSIIFQPNRNTHYMLELIGIGNNRMKYISKLIELQNNRQIGITYKLDSTYIYISFDETKIELHKHNKIENRILALDLNPNYIGYSIVDWHDDNKYDIVAKGVYSFEKYNIIESKQHKLKLTSCAKQRIHINNKRHHDIIDICKNIVDKAIHYKCQIIGIEDLNIKPSNRGKGTNFNMRNLFTTNLTKRCNVNNIRLVKVIPNYSSFIGNIAFRHEELPDMILASLEIGRRAYEYNLQYIEKKKNKIKNIVFPKLEDFYDSYVKSLEEEFNIKEKFSTWIEMYQYIKEAKIMYRFPFNRCKYLKVFRFKSSLCYILQ

SEQ ID NO: 1619 - protein, 336 aa, synthetic construct
  REGION 1..336: note = Synthetic
LVGRKNLEDRCKGLISKEEYKKRRLSSIYSIGTAKPYKGNQKFRIDKDKRSIIFQPNRYVHFKFDFLSIAKNYVKIIEKLFIRQEAKDLPITYKLNSEYVYISFEEEILYKDDFKFRKIKDRYMSLDLNPNYIGYSIIDWKDSSDFKVIHSGVYSFKLLNNLYKDEKLASEDKKLKYKSNKKNYEIIQVARNLIKKCCYFKIENFVVEDLNIKPENKDKGKNFNKLINNQWIRCKFLHNIKKRCKIFGFNYIEVLPQYSSFIGNIIFRNLNYPDQILSSIEISRRGYEFRHQYILKDKKQTKNIIKSTKDEEPANIQLQKGWKRDEYTVERGKIYF

SEQ ID NO: 1620 - protein, 452 aa, synthetic construct
  REGION 1..452: note = Synthetic
LKIKYNTNLNNINIIKQYQRQYTICYKVIYKYLKLGLKSNQIKEKLKNYKNINLIINNSWFINCLFYDVKCILKETNNVCFNYNLHLKRNKNLITKQEFKENKYFQVCSNGEIDKKCNRFFKILNINQILFKPNKYTKILLNLQSLGKNRIKILQQLLNLQNKNNILSITYKLNKDYIYLTFDESNLSLIKLKPINNRIFAIDMNPNYIGYSIIDWKDTENLKFNLINAGIISLKSLNDKYFSFKKLKLSSNNKLKLHLTNKRKFEIFEVSKQLIKLAKHYKCEFFAIEDLNIKSNDKNLGKKFNSLCNNLWNRNKLQQNIQKRCNLIGIKFKKIIANYSSILGNSLYRNLKLPDMILSSIEISRRCQEFNLQYIKKSKKVTKNIIFPNLTEKVRNLLNQTMEVLGNKFQFETINNFCYFLKKNFKNKYRVPLDLTRVFRQKHLKYQLINFI

SEQ ID NO: 1621 - protein, 445 aa, synthetic construct
  REGION 1..445: note = Synthetic
LKIRYTVQESFKDTISNYQRQYNNLLHLFYNRLKEGISETACKHLEFNNLELMNSWFRQSCVKDASYLIKDSKDEVILFGGKKLFEQRFRKNISKEDFKEKKLVPFTSTGEGRCKGNRLFRLVESLDRVIFQPKSGTKISLNLIGVGKNRVSILRKLYRHQLSCDLPITYKLDKQYVYISFDEIILQEELVKPIENRVMSIDMNPNYMGYSILDWKDSEKFEIVKTGIISLKSLNDYDKSLKDRKLPSNSNDRVYTHNKRVYETLESSKYLIKLAKHYQCECFAIEDLNMKSKDLGYGRANNKLILNNWNRNKLSSNLEKRCKILGIKFLKVIPNYSSIIGNLVYRNLQLPDPILASIEISRRCYEFNLQYIMKIKNKTKNIVLPILESLKDKVKHSLEEVKCFIDFENWQELFSLLKKSKLKYRFPFDEKVFESKTLKLVNQFY

SEQ ID NO: 1622 - protein, 342 aa, synthetic construct
  REGION 1..342: note = Synthetic
VSQVPLTFNLQIYENQIQISYDPVKLYGREEWEKIKPKPRRIGSVDLNPDETGFVIADFYDKQGFKIICAEVFSVEELNELEKNLDGRGLKSSDPERKHLTNKRNYEIDIICRDIMRMVSHYRCETFAIEKLKFSPAGNSGRSREFNKLVNKFWCRKRFYANIKRECYIRNIEFKEIVAAYSSFVGNLLFRSTGLPDMCLAALEIGRRAYRIKEIYSIYKNYKDIPEEKRENYILPDCEDFKGFITEAWNEFRSDILKNTKVFGEDPDLNEELEKDSKNLLRKIYDAIGTKMVRVHLDKLLENSNSNGSVHRLHTEKSHTHRIIFDVNGERSTYAKSVTNQI

SEQ ID NO: 1623 - protein, 468 aa, synthetic construct
  REGION 1..468: note = Synthetic
LKFAYKIIFGDKELLEKLRKQFSSLVHIFYNLYVDNPKITCHEANEHIKGYKNLDLMDSYLILCAYNKAYEIYKRHNVDNKGEPAGHKLVFGERKNLIKTSKHTLTKKEFRKLRMMPLYLEGEKQYHGNRRVRIKDKHTLEFSVKGKVVFVFKVFDKRCSILNQLKKKQDAKQIPITYTIGDDYISITYNQKLLTVPKNHNLLANRIMSMDLNPDYIGITIFDVDQDSHIRNILKAYVMEWSTITEVQKELNQPNNSEGNKYLTNKRKHEIQEIAKHISDLSVFYKCKYIAVEDLDFDSNCKGFRNSKWNRNLVFQSLFKHSVENGVTILRVNPAYTSIIGNIVCRHNIPDMCRSAYEIGYRAVKGLQNGNFDKDWVDTNEYLHSLDKVKDFIIKSLEECGNKDKEIKKVSKFTNYRQISIFINENNIQYRVSIEDCHDNETVYRFKNKKSLAKIRSYGVRHYKKKIA

SEQ ID NO: 1624 - protein, 461 aa, synthetic construct
  REGION 1..461: note = Synthetic
LKLKHDPRGDVDAFTARRKQYSSLFRILYNKLVDNPSLKYDDAVKIVSTYKNLELNDSYLRNAAFQDAKAEYDSDIKKDNKGHKVIFGGEDNFIARRKKLITKEEYKESRLRPLYVIGEANKGGNGRFKIRNRRYIDYYENGEVLFSFRIKDKRSRMLAILKKKQDNKELAITYKADSEYIYISFEEQLDLDLNRLVVPNRYMAIDLNPEYIGIVIFDVINGKRKLVASDNFDMSEIIKRHIDSKSAPDSEESKYWNNKRKYELKEVNKRIFNMACHFGCSYIVIEKLHFKNSKGRKCTVQWNKRLTIEYLMSRCYVKGFTKLLQVNPAFTSIIGNIICKHYMPDMCRSAYEIGYRGVKGIQNGNFNDEGVDNTNYPHSLDEIKLFIIKSLEESGNKDKIEEVNKFTDYNEASRFLYGNKIKFRTSIEDCQNNETVKVFKNEKSLVKERSYHVRRCKKTVV

SEQ ID NO: 1625 - protein, 476 aa, synthetic construct
  REGION 1..476: note = Synthetic
ISIPYRCSYDDRQFLDELRRVQSAAIRTAYANALHADGSKRSEKDVREIVKSRFTKLGRLDSWAMHCATRVGVLKRKLRPEGNAVFGGRAGLERRRKGLISNDEWKRMRLHPFVSFGDSQKIRGNQNIHLIDETTIIVKIGRKEYGGRSGRTVTQTARIDLARMKGAPGTIMGQLADICAQPEKAHRINVSYSIGDTHVSITFDPSDLPDHPQRRRPVVSKKGRTLGIDLNPNWIGLAVASNVGDAAQNEDTELLEYALVKLGMAVDASPELVRETLAAVCDRAISMARKHRCGTIILEKGLGKLRSSGKSRSLNRLLNYWARTVFVQMLTRRARLAGIEVLEVWAGYSSTIGNLAFDAPDACASATEIARRGIALLAGSKNVLPALEEGCVSRLWKNGKVPAELGSWQDVHRTIKAAKIGYRRPHPDVPIGARGSDVHGTKMFCGHAVVRLGRRHRPGLLFRMATGRPDAAVRIL

SEQ ID NO: 1626 - protein, 478 aa, synthetic construct
  REGION 1..478: note = Synthetic
ISIPYRCSDDDRQFLEELRRVQSAAIRTAYANALDADGSKRLEKDIREIVKSRFTKVGLLDSWAMHCATRVGVLKRKLRPEGHAVFGGRAGLERRRKGLISNDEWKRMRLHPFVSYSDSQKVRGNQSIHLIDETTIVVRIGRKEDGGRSGRTVTQTARLDLARMKGTTAIIIRQLADICSRPDKAHRINVTYSVGDTHVSITFDPGDLPNHPQRRRPVAPKKGLALGIDLNPNWIGLAVGSNGADASNIEDTELLEHALVKLDMAVDASPELVRETLAAVCDRAVSMARKHRCGTIVLEKGLGKLRSSGKSRSLNRLLNYWARTVFVHMLTPRARLAGIEVLEVWAGYSSTIGNLAFDAPDACASATEIARRGIARLAGIKEVLPALEVGCVSRLWKNGKVPAELGSWQDVHRTIKAAKIGYRRPHPDVPIGTRGSDVHGAKMFCGHAVVRLGRRHRPGLLFQPMVTSSKPDAVFRAF

SEQ ID NO: 1627 - protein, 518 aa, synthetic construct
  REGION 1..518: note = Synthetic
ISIPYQTSTEGRTVLTAWRRGYGAIVRSACQALRRDAGTALKELTTTLYDRHRVSGIDHWLAHCAVLEAAALPEKDIVFGGKGALQRRQKGLISNEQWKALRLRPMTSIGVRNFKGNRHFRLSDGGRACTVTVLKKPVVLHLPEMRGTWGEIIRALALLAPDKEISIQFRIDSHRLHLTFDEMDLRRLQPGETLTLARDRDQAASGRRARGRGRGPGYVAPRPRTSAEARPVHPQWRTPVPAAPGRALGIDLNPNFIGLTVIENRGDPIKLSDCKVLDSECIRLDIPQDASDDLTREILSRAAGHAVRLARKWNAGLITLEHGLGKLRSRTKNRALNRLINFWGRSVILASLTRRARLAGLTVSTVHAAWSSTIGNLVFDLPDPCAAAAEVARRGLARACDRNADILPLYEPSLIAPHDQWKDCAREMEILPDFGRLRGWVDCHGQIKTAQTAISRIRRGKDRVGYRRPLPAVMVGRSQVQPAGMRAGLAVRPLGRFKAPGTVFRNLAVTQTSTRYAG

SEQ ID NO: 1628 - protein, 513 aa, synthetic construct
  REGION 1..513: note = Synthetic
ISIPYGIVDGDPEHLTLWRRLYAAAVRSGYRAAGSGASEKDIRDGLKQRFAGQGIDAWLLHCATREALALRKRVPDGSMVFGGKKNLERRRKGLITNAEWKALRLRPMTSLGDSFQKGNRHFRLSPDGRRCELMVLGTKLVLALPALVGKWAKILPAVARSAAAKEMNVTFRIGSKMLDISFDEMDLRKLAPGVTLRATKDAEIAAGTRLRRGRPRSDNYVVPKLTSIGERFVHPEWRNPIGAVITRVLGIDLNPDWIGAAVVENRVDLTKLSATTLLTHKLFHLGLESDASDESVREMLAKICDQLISLARAWHCGVISMEQGLGKLRSGGRNRALNRKLNFWARTVFEQMLRRRCALAGLTLELVWSAYSTTIGNLTFPAPDACAAAAEIGRRGLALRAIRAGAIPPEQGLLPVFEPETVSIPWKDEVQLATTWVEAHGRIKTAQAAIPRERRVGYRRPHHDAGTLRRDPTGRTTELALSGHAVVRIGHKHRPGLALKPVTTGAMRVSAST

SEQ ID NO: 1629 - protein, 452 aa, synthetic construct
  REGION 1..452: note = Synthetic
ISVPYTTDEDSRAAITRLRRIQSAAVRTAYANAVGPDGKRLKQKDLRDLVKAHFAGHEADAWLLHTATLEGIACRERVPDGSMVFGGKCLARRRAKGLIPAQRWKNARLRPLNSAGDKTRLGNRHFRLAEDAETCALTVYGARYTLVLADMRGKHHAILQQIARDAALGLINVQFSLGDHRLNITIDETKLTAHPDRRSPQTFAKNRVLAVDMNPNWVGVSVVDMGDDGGVTVKDWRLFDLTGLNTGTRQDRSQKAAADQANKITTEVAEIAESIANLARSWNAGLIGLENLRGMPRGDLGRGANHNRLVLNLWTRQHLTACLKRHARQRGVEVLEVNAAYSSTIGNLLHEFPDAVAASIEIGRRTLEVRRGRQDRFYPVYSGDALAQRWKHVPGVVEAGDWVGLHGALKRANVRVRRPHPVAPSAAFEVRAHMSRTSRVSQWRVACANSPA

SEQ ID NO: 1630 - protein, 385 aa, synthetic construct
  REGION 1..385: note = Synthetic
MAYNKAKKEISEKKIRNIVKPFTILDAYLTQCAILEGITLHKSGENDTVIFGGKSNFVRRCKNLITKEQYRENRLLSIGSQGTESRKGNRKFRLVSPNVIHYLYDKTFIELKLPELHNNYKEILEELYVLSNENKIGITYKLNKEFIWISFDESKLECLKVYKSIKLIENRVLGIDLNPNYIGISINEINEDEIKVISTKIYSLMELNKSRNSDKVNYELSLICKDIINISRKYQCSKIAIEELSVKSKDHGKGVGFNRTVNGWKRNYLINLLKKRCNLANIKLIEVNPIYTSFIGNMLHDYPDMVSSSVEIARRGYFKFIKGKFYPKYDNNILVHRWKEMAGIVCCNWIELYKEIKKSGMRYRHPLPLNGVYEFITKKSLVNCY

SEQ ID NO: 1631 - protein, 419 aa, synthetic construct
  REGION 1..419: note = Synthetic
IKKNHSQDIDKRLQKQFSSVVRFAFSRRKKDGVTKASELEKIVKNKMKGIDALDASWIKAAVKKSLELDADKKIIFGGKVEFFKRKFGKKNSFDRSIPIDMRGSSIDRGNRKASLDIENSLLIFKPKNGTKIEIPLHLSKNERKMLSELQENCKKKAGFFNLKINASNVWLSFDETKLESFKRQFSFVKGRVLALDMNPNCIGVSICDFRNKTSIIHKEVISLFKLNECSTNKRKHELLELQKIIISLARQFHVQTVAFEILSMKSKNHGIGKNYNKLLNSWNRNIIQNSLRKHLALQGIPLVEVRAEYSSFMGAMKFSQEFDPIAASMEIGFRCHLKERGLNEYDSIKEKCSGLVPTRWKNMVQDDNWTFIDLYRSIKEKKLKDSYRFLFKPDEATAKFGWSCLRSKSCKSMVDLYMV

SEQ ID NO: 1632 - protein, 412 aa, synthetic construct
  REGION 1..412: note = Synthetic
IKKKHNINDIFFIELLEKYNNVIRYSYNRRIKDKITKLSDLEKNVKQFMNNIDCLDASLIKCAVKKSTELQIDKKLYFGGKSNFFKRKFNKINNLNKLTPLEVRGSSSDPNGNRKACLNGSIFTFKPNRKIKYDIELKLSKNESRLLSIIEEESKQGLNYFNFEINEKYVWISFNEPVLEKHESKKDRYLGIDLNPNWLAISILDSGSKEIFKELIDLRLLNKSKRNKKLFEIIQINKHIINLCKHYQVQYVCIEDLIINSKNHKLGKYFNKLINNDWNRNYLVNNLTKWLNISSIKYKMVNPFYTSFIGQVKNIDDYDSIAASKEVAYRAYLMSKGIKVSDYVNNFLSDLVSTHWKEMIPNINTYKEMYDYFKSSKKSKNKYRFLFNDVEKYQKSYFRLNSFKSLTDLIMV

SEQ ID NO: 1633 - protein, 415 aa, synthetic construct
  REGION 1..415: note = Synthetic
YKLACSHSIPEDYFKQFNNVVRFAHNRWIEEKSVTEIEKACKLLINIDLLDASFVKMAVNSAKSLKNKEKVVFGGRKLFERLKYKKTENKTEWDKKRNPSIYLRGSSCDAAGNRKASFDLLNQKIIFKPRCGLIYEIDLKNDRRLGALRRLQDLCEDKKACFSLEILRNEVIVIFDEAVLADASTRKPIKNRILSFDMNPNYIGLVVMDNQTIRYKEIIDLSILNKITNKNKKLHETCEINSRIVALARHHRVELIAFEDLNMKSKDHKKGKNFNRLVNNSWNRSKLVQNLVKKCNINGIKYKEIPAFYSSFVGCLTQPEEYDSIAAAMELSRRARQFLTNQSVTNFPEVDLKAITTRWKEMLGFEIDDVSWINLYDWFKKRTKLSYRKLFRLQNFEGVSLRLKSVSSGVVCHLV

SEQ ID NO: 1634 - protein, 308 aa, synthetic construct
  REGION 1..308: note = Synthetic
VILKFNKQDHVEIRLPILNKKHLEHLSKLQDLCDQNKGCFSLEVNNEYIYIIFEEKYVQEKTVRSFVEYRILSIDLNPNYIGLSICDWSGEGSKQIVYKEIVDLSKLTALKQDKAYKKHKRDYETSEVNRHIIDIAKHYKCEVVAFEKLDIKAQDHSRGRKFNRLVNNCWNRAKLIQNLTKRCVIARIKYQGVLAMYSSFIGQMTNEAEYDSVAASLELSRRAYLFNKAIKEKAKPRGIVYPTFDVNALPTRWKERAKEEGIKSWKKLYLSLKKSKSRYRFLFDLDIFKGISFSLKSCKSLVLVHRFA

SEQ ID NO: 1635 - protein, 453 aa, synthetic construct
  REGION 1..453: note = Synthetic
IKLKIQNTIDITEYQRQFSCLVRYAYNRILDGKTAADIRKLCKTLNNVGLMDGSWAEFAYYRADRNIEVQKALHPDNNVVFGGKKNFSDYSNGKITEEEYRNNRLSNLLSIGKKHDPRGNRKFQLDLANNKVIFKPSRDTHIDVILPRLSKNQKKLLEQVEMLGKNHEMPITYELSSDHICIKFDEAYCSTPYHNFKKDRVLAIDTNPNFLGITICDYNLDGEQKVLHKEIISNAEINALFTTEGIGLPSTHPFKKYITQKRIHEGHEVAKYISVLARSWNCEYVALEKLNIKQRDIGKGKTYNRKCNNMWNRLRMFDGIKKWCSLKNIKVHDVPPQHSSFIGCINYTTDYDMIAASLEISRRANAFISNYRTKTKDHTNHIVYPAIEKKKILNEWKDEGLTAKDFSNWVDLYGWFKQNPELNYRVLLDVGKTTEKSFRLFSQKSKLKIFRIL

SEQ ID NO: 1636 - protein, 430 aa, synthetic construct
  REGION 1..430: note = Synthetic
ISLPYNCSIEDRNFIKDEISKSSNMVRYSFNRFKENLSEKEIRELSKSLNRIPSDSWLIQCAIKKAGYLFKTNKDSKVIFGGKFNFFQRLKKKINRGEFKNNRLLSIYSQGEILRNGNRKFKLDLDSNSVIFKFSSKKHIKLQLPNLRKNYLYELTKLEELCSNKKASFSVELKLDTISITFDEALVYPSDYQGFSNRVAAIDMNPASIGFSISEFDGDTQKVLYSELIDFSYYMKNLHKSSDSKDFKYQNNKQKHELREVAKRIINICKNFKVSQFGIEDLNFKSNNNLNVRELNRRTKNKWKRICLVQAIRKQCILNNIEFKEVNPCYSSFIGNLSYNYPDAIAASLELARRANFKYIKGKFYPSLITKESLFNHWKESVDWMYKSWKELFDIIKMSELKYRHSLEEYSSRVFSKFYSKSKITLYGFK

SEQ ID NO: 1637 - protein, 450 aa, synthetic construct
  REGION 1..450: note = Synthetic
IKLPYKTTDENKAKILEIQKEQNRLFGKAYQFQKTNPTQKEMTCYLNQQNSTLDSWFIQSAFYEGKAWLKADLETYEDKLSDWEDRKRIATSVKTTKKAAIKNKKLKQKPSLFRVFGGNKLRKDYNLGKISKDQYQKDKLAPISVVGESSKNGNRKFCLQIEKSMVIFKPLCGLKIELFLPNLRNNYQNSLVELQTLAETKQIPYSVKLDSENIYISYEKPILQNKFFQINTLALDLNPNYIGLSVQNPSQEVIFTKLFDISRLTDTNKQNYELSIIAKYITNVAKHYNCKNLAVEDLSIKSRDHEKGKNYNKNVNNKWNRNLLLQYLQKRCRLVGIKFLEVAAYYSSIIGNMLHRGFADPVASSLEIGRRATHGATKQKDENFYPDVSIGNKFCHLLADKTEIFSNWKEISSFFKKKPELRYRVPLPSRECFQAFIDKKSLVFTCDGVV

SEQ ID NO: 1638 - protein, 466 aa, synthetic construct
  REGION 1..466: note = Synthetic
ISFEHTTDYDLTSLFQEASKERRLAYNRIEDGLSEKEIRAYLKSMSPNSMLSAYMQDSVIKSMVALKKSIDALNDENKKKNIANEKKYLKSREDGKPIKQPKKLNENIKPIFGSKKNWDLTCKKKRTREEWKKDRLKNGLTIQGEALCKGNRHFELHIDEDYVLFKLNRKEHIKLNIKSLGKKWKKELLKLQALNNVKVGEQGYTYTVRITFDKVCISFEEFKQPPRKLNKNNYAGIDLNPSNIGFSICNNKEVKFATEYNFKKIIDEICNSKLASDDAKNKHLQNKLDHETYEIPKTIVRQCLHHSVKFLFVEDLQFKTTSNDKGKRYNRRTKNLWKRNKFLNNLEKRCNEVDIKLIKIDTEHTTFIGNLMYSYVDSVNASLEIARRGFEVIIKKVKNSFYPPLTADGLKHQWKEFLGENINSWVDLNKQIKNSKLRYRVPLKDTLYEGFKMSSKKSRVERLVFT

SEQ ID NO: 1639 - protein, 428 aa, synthetic construct
  REGION 1..428: note = Synthetic
IKLKYKSNTDFQDFLSNLQRQFSNVYRYSYNRFYDGLSKKEIYHLIPSLNNVELIKGRLINDCIDFAYRLYEKDKKSNHKSIFGGKKNFILKCKEKLTNEQFSQKRLISLYFQGETARSGNRNFNLDILNNTITFKYNKQFHFDLSVKPSKNQLKQLIELQDLCNQKKSKFTITLSHEFINISFEPTKHEVIDLIDDRFVGIDLNPTNIGMSICNSKMEVIDSYDFEFSEIINKIKKSKVASNSKEMKYLNNKLDYEILNISKKISGISKHYKCKFIFIEDLEFKSKNEWNNRLLKNLWKRNIFIQNLEKRCGIANQRLFKVNPAYSSFIGNCMYDIVDPVNSSMEISRRGYEIIINKSKKFYPVVWLKESLKHQWKEKVSDIPDSWKELFDLVKNLKLSYRVSLKEDVNDFNVFSKKVRMYDIYQFS

SEQ ID NO: 1640 - protein, 440 aa, synthetic construct
  REGION 1..440: note = Synthetic
IKLPYTCNDENFTEILFNLRRLQSSYLRSAYQLFNEGLKQKEVQQNETLHLKFELSSWFKQSALMEAKGLFAKSKGIKFIFGGKFNLLKRLKNEITKDEWKAKRLSNLKVQGETLKKGNRHFSLKIEDNVLIFKPSRNEKFTLHLPNLKPNYKKKLELLQLKCSLKEQPFQVELNESFIYISFDEVKEPTPKVIENRYLGIDLNPSNIGCSIIETLKDGSIKVIAVREYYVKVLIDKIKVLNVASSDPKFKHLNNKLNFETIEIAKSVNELAKEYHCKGIFIEDLKFKDKTDKVHSTSFNRLTKNLWKRETFSSNLKKRATLSGLTFYEVSPIYSSVIGNLMYNFTDPINASIEIARRGAQVIFEKEKMKRKFYPEFKISSLKDQWKEQFSECKDWRAIFLNLKNSKMKYRVSLSSESLGRVFSLNCVKSFTFYHNCSFS

SEQ ID NO: 1641 - protein, 444 aa, synthetic construct
  REGION 1..444: note = Synthetic
IKLPYRSTDKYYAVLHQLRKEYSSVVRYSYNRYLDDIKQIDIRHSLSQLNNINHLNSWHEQNAIMEANQLFKRFNDTPNIIFGGKHNFIQRLKNKITKEEFDEKRLLPLNIQGECLKKGNRSFILDIIDNNQIIFKLNTKQHFNLELPNLRNNIKKQLYKLQELNEVKQGNHGYCYSIKLTDTHIYISFEEFKEQIHQYDEQRYIGIDLNPDTIGISIHENNKILHTQEFSLKLIFDKILSNNLSSDSKEIKYYQNKLQFETYEISKSISNLAKHYNCKTVFIEDLNFKSKLSKSQKYNNIGNRKNRNLWKRQLFVNNLVKRLNIFGIKLFTVNPAYSSFIGNLQYNYTDPINASIEIARRGYEYRINKNKDKFYPIIKLKDNLIHQWKEMVNIDTVKNWKDLFLIIKNLKLKYRVSLADCQRTFKVFRLNHTNTSCINIYNFS

SEQ ID NO: 1642 - protein, 436 aa, synthetic construct
  REGION 1..436: note = Synthetic
LKIPYQTSEESTLLIQELRRQYSCVVRYAYNRAKEGKKQKEIRSLVKLLGNINLSSWFVQCAIMEGLTIHKRNKDKKVVFGGKISFRQRSKNKISDKELKEKRLFNLVLQGEGCRQGNRHFDFTKLINNKLIFKVNSKNHLELSFPILNKNYRKKLKFIQKVSELKEQPITISLSDKYIYFTYEEPKNYNVNTLLQNRYIGIDLNPNYIGVVVKSDETILHKQCFDLSDITQLIRNEANSSDSVRFKQLNNKLKHETLEISKTIESLALRFRCNFVFIEDLKSLSKANLDKGHALNRLTKNLWKRVYFVQNLEKRCKLNNIKLFKVNPMYSSVIGNVQYDYIDPINASLEIARRGYHVIILKDKAFYPSFTIKASLLNQWKEEGSEEVKDWKSCFKVVKNSKMRYRVSLEKVEKPFKVLKMKSIKSKVLIYEFQQS

SEQ ID NO: 1643 - protein, 438 aa, synthetic construct
  REGION 1..438: note = Synthetic
IKLPYILKDKGDLEYISKLQRQYSSVLRWTFNRFNDKLSEKEIRHLFKDKPLNNVEMLDTWFLQSAIYDAKALFSTGNISIFGGKKEFKARSLGKLSKEEFKENRNSPVCSVGEASKDGNRKFNFKIIEENVIEFKPFNKRKISILLPKLRNNYKKTLSKIQELCENKKISVTIKLNKKNISFTYDETLLKEEIKTDKKINRYDGSCRYAGIDLNPNYISISIFEDAKRIISKTYKLSELTKKSGEVNTSKKSKYLNNKLNFETFEISKNISKLLKQYNCKHLFLEDLNIKSENKGKGKFFNRLTNNSWKKNLFVLNLKKRCGISNIKVYDINPAYTSFIGNLTNNLPDPIAASVEIARRGYNLIILRNKQFYPELIKVEVLKNLWKKDLEWIYSSWKDLFILVKNSEMKYRVPFSSEDVFRIFKTEKTRVTIVYHSY

SEQ ID NO: 1644 - protein, 406 aa, synthetic construct
  REGION 1..406: note = Synthetic
IKLPYKSDYNFINLMRQYTIMVKSCYKQLLKGSKDKDIRLYIKSLNNISDLDSRFIENALLDAKGFQKDNKIIFSKQNFFKRLKNKINKDTFKENKYLPLVNYGEKAQKGNRKFQLDLENNKIVFKLNRNEHIDIFLPSLKSNYKKQLTEIQLLMEENEIKTSFKIDRKFIYISYEPLEKENVILKDNRILGLDLNPNNIGISILEFKGLEFNIIHKSFISLYENNKLNKNKKNYNVIMISKQIAQLMKSFNVKNLAIEDLTMETKQHNKGKKYNKLVNNDWNRNLFVNNLKKRCKILNANIYDVHPAYTSIIGNLRYEYFDPINASIEVGRRGYLFNKMFIKNSFYPEFKLKNQWNQWKKEIGLFFEGWKDFYKHLKTLEMKYRVPIQGLVYKKECIKRIEFSIF

SEQ ID NO: 1645 - protein, 437 aa, synthetic construct
  REGION 1..437: note = Synthetic
IKIPYSSDYDFSLLLKQYNNAIHFAFNRFQENLSQKEIEKFVSNLKNINLLSKRIQLYAICDAKFMFSKHKDKKIIFGGKFNFLQRCKNKITKEQFRENKLSPLNLQGELKVRGNRYFKFELKNNQIIFKLNRKEHINLKLPNLSKNYNKLLNKINELSQQNLLSYSIMISKTHICVGYDETILKLHEQFKTKSNRILGIDLNPNYIGCSILEFDKNNNQKIIHKFCYDLSKLTIKSEESSSHKKSKYLHNKLKHEYYQIIKDIITKCKSFHVGNISVESLSFNKNLPCKELNRLCQSKWLKGLFLNNLTKWCNIYNLKLVEINPCYSSLIGNINYEEFDPISASIEIGRRGFECYIQKKKDKFYPKFDQQLIREWCRRKNIVLGSVVESWKEFSQILKKSEIRYRISLNTKLFKVFSLNSIKSNVLLYNMFKICTV

SEQ ID NO: 1646 - protein, 437 aa, synthetic construct
  REGION 1..437: note = Synthetic
IKLPYNTTTTNLDLISKLQQQYSIIFKYSFNRFIENKTEKEIRFLCKSLNNVELLDSWLVQNAIKDANYLYKSKLERDEDLGYSSKLIFNKSNFMKRLTAKISTEQFKTNKKYYSISSQGETPKYGNRKFKIDLTNNKIIFKYNKHNHIDLVLPNLKQNVKSILSTIETLSSTNKTNFTIKLNSKHIHISFSEIITKPKNITKLNTNRILSIDLNPNNIGVSVLEFRGEDYDVIKVFNYDISKLTNSDSIHNKLRHETVEVVKKVVNICKSYGCMYVGVEDLDIKVSDKGKGKRYNRLVNNKWLRNLFIDNIEKRANIEGIELVKVGAHYSSYIGNLQHGYIDSINSSIEIGRRAYWYKVKKDKGKYFPVFKLKDSIKDQWKESNIERFRDWKELCLFLKNSGMRYRVSYDDCKNKPHKFFRLNCTNKSLINIIEFI

SEQ ID NO: 1647 - protein, 456 aa, synthetic construct
  REGION 1..456: note = Synthetic
IVFNIEYKTEKDMLVVMNDERIYSSAFRYSFNRFIDGIEKKEIYHDLSGKFSELGSHIRDSAISDAKGQYEAYLENKKSFYKDDANKDKPYKVHFGKLFRYQNKLITKDEYRESRNRGLMSVGEANQHGNRMFKLDVDKKAITYKRRCKEHIEFGITEKLSEKRRELLKRIEIAMSEMSSPITMRIKRKKLYITYDESEIEKYKRFHNLRSNRILGIDSNPNYIGLSIIDCNDAFNFDVVHKRVYDIKELLKLDDSNKENYELSIIGCEIVKLCKHFRVGKMAVEKLDFDVPLTKRKNSVNKNGKRRRINGRDQNRLLLNKWKYRRIFGHLKTLCNTYGIEFAEVNAAYSSQCGNLIYGSENTPDMVAASMEIARRSFKQFEKGTFYPPFNKERVVDVLGSQWKDEPMPNFNSWKGLFPIIKESKPRYRFPLDESAAVFRHNYSKRLTVVNVFNGS

SEQ ID NO: 1648 - protein, 425 aa, synthetic construct
  REGION 1..425: note = Synthetic
ISFKISYEDSNHSIKNDERIYSSIVRYSLERFYENKDQTSIRRDCVSKFNFTSYLITCAVKEAYGIYKKVKDQEKKVVFGDFKRYLKGLISKDEYKKSKNRGVYSEGDYMHYGNQLFQIDIENYSVVYKRKRNEHIVLNLCEKLSHKRKRILELLYLTMRNKQSPVSFRIKNDNLYITYDETVIESFKKFKELKSNRILGIDLNPNYIGLSILEFDDKDEFKIIHKRVYDLSSLNEDCSTNKVRYEIQQINNEILKLCKHFKVSKLAIEDLKFKKNNKFWSKKLNRLCKNKFRYSSIKQHLQTLCNVHGVEFIEVNACYSSFIGNFCYGSDSTPDMVAASIEIARRGYKKFQKEWFYPPIVTLERIKEVLRNQWKKELKLDFKFWKKLFEKIKESKLSYRFQLMEVAAVFRQNYYKKKVKAYIFA

SEQ ID NO: 1649 - protein, 439 aa, synthetic construct
  REGION 1..439: note = Synthetic
IKLPIQNEIDTSDIRRVFSSCVRFSYNRHVGGMEQKGIRHLIKERDLFSILPAHIIQCAILEGKYIHTKNKNKNKNKKVLFGGKRNLNLYLRSKITKKEFKENRLHPLTLQGEAHLEGNRNFKFDIMNGKIVFKFKRGQHFDIVLPNLRKKLHMELLGLQTAMEEHKLPVMVKLTKTHVLISYDELITNDFSRNKPTVKNRILGVDCNPNYVGLSVIEFIDGAEFRILHKEVVDMKGLNKPLGVKSSDPKQIAQNNKARFEAIEVAKHVAAVARAFSVSKVIVEDLSIAPSDKGKGRRLNRLCNNQWQRSRLLQNLESRVWMQGMEFVKVNAAYSSTIGNVLHGNDTTPDMVAASIEIARRGYKKFEKGWFYPPLPRNEGAHELWKQTVNLSACRDWKEFHLVVKSVGLKYRAPLDVDKASRVSSLSCIKSCINLYNFI

SEQ ID NO: 1650 - protein, 426 aa, synthetic construct
  REGION 1..426: note = Synthetic
IVLDIVNGIDLGELPRLYSSMVRISYNRAKEGMTGNDIRPYLQERFPEINSWLVHSAEVDGTTIHKSNVDEHKIHFGGKKTYEKYMKHQITKEEYRHSKIMPIYSLGEACKYGNRLFDFDLNECKLTFKPSKNTHIPIEFKPTKRMEELRKLQVLTDSGALALTVRLTDRNVFLSYEETGINVDKYDGLRKRRIMGIDLNPNYIGISVIEFDRKDKFEVIHKEVIELTDFNKEPDGLKSDDPKKKKFNRKRRFEIIELAYKIDRIAKYWHCGKISMEKLAIKSKDMKKGRKLNKLVNNTWIRNLLRTKIHMLADTHGIEFREVIPEYSSIIGNLYYANETTPDMCAAAIELARRAHKQFEKGWNLPTPDVTLCREQWKHTIIGARGWKTVATKLKNSGQRYRVLLEETQCRLRSFNYKSNIYFNYF

SEQ ID NO: 1651 - protein, 428 aa, synthetic construct
  REGION 1..428: note = Synthetic
VKLQTLTKPDVLDDMRVFSSMVRVAFNRFQDGLSEKQITAYIKGRFSVNCWLIRSAITDAHALFDSQEQRHIVFGGKWNLKQYLKGLITKEQFKQNRLMPLCSIGEYQFKGNRLVDFSLLNNRVVYKPFRGVRKEIQFCPVKKKLARELAMVQELADQKKMPVTVKFTDKYLYLTYDESLIYNEAYKGLKHNRVLGIDMNPNYIGVSVIEFDKADEFKVLHKEVFDLTALTKPSGEASTDKKSKYFTNKLKHETLAIAHKINKLVDCWKCNKLAVEDLSIKSSDKQMGKTFNRLCNNKWDRSLFVNKLKMLAGIHRYELVEVNPAYSSIVGNFAYGGPTTPDMVASSIEIARRAYKKFEKGWFYPKFNVETLDERWKQTLAGVKTWKNLFLKVKEAKLKYRFLLSNYVGNAVFSGFYNQRKWKLLLFN

SEQ ID NO: 1652 - protein, 447 aa, synthetic construct
  REGION 1..447: note = Synthetic
VKLPITLDKESKELLTTLRRQQSTVIRTSYKSFLVNITEKEIKTKLKSYNLTNIDSWFIQSGIFKSKSLVKKSNNKTIIFGGKKNWYDFQEKKITKEEFKEKRLSPLVSIGEALSNGNRKFSLDIVENNSIIFKPKCGTKIRIELPKLKKNLKKELFKLEELCKNKQVPFSIELYNDNIFISYELNEIQRLKSIIKRPITKKETRDKAKETLKKLVKPKKSNRIIGIDQNPNYIGLSILEFDKKDKFKIIHKEVVSFKELNSKKKYNNNKKKHELIHICKYIVNLAEHYKCGKFAVEELKFDKKLNGTVLNRLCKNVWHRTLLLDQLTKRCNESDIELVEVNAWYSSFVGNLIHGSSSCPDMVASSVEVARRGYNKYTKGWFYPELKSSYLKNQWKKDLDSNDLESWIKLYNKLKEMKVKYRFSLSENLEFFRNSSHKSNVDRFIFV

SEQ ID NO: 1653 - protein, 436 aa, synthetic construct
  REGION 1..436: note = Synthetic
IKIPIKLQSDIKDLQRQCSIVIRYAYNRFKEGKNQKEIRLLCKDLKNINDLNSWLIQSCIMKAKNLIDTKQENIIFGGKFNFIQRTQNKISKKDYQNNRLLNIISQGEMLKNGNRMFDFRIIEDNQIIFKLNKKNHISIQLPKLKKNFKKELYELQELGLNKKLPISIEFNSEFIFITFEENLLYQKVENNLKDNRVLGLDLNPNYIGLNISEFDGEKQDIVYSCIFDISKLTQKLNKSSSSKEQKYQENKRKFELYQICKEIQNLALYWKCKKICIEDLNIRSKQHNKGKNFNRLVNNKWNRNIIYSNLRKRCTLNNIQFVEVNPIYSSFIGNLLYSNDKTPDPIASSIEISRRGYFKYIKNKFYPSLIKIEDLYDQWKKTTDQMFTHTYSSWKELFEIFKKSKLKYRFPLEEGKFSKVFSLRNIKSNITLYSFI

SEQ ID NO: 1654 - protein, 539 aa, synthetic construct
  REGION 1..539: note = Synthetic
RKIKITYCSDFDFIKDKVKSYSYAMRLMCKMIDESSDNNFIAKFKTRFNLTDIEYRSLVADVKAKITSMETTNESKKKKIEELNKRLYEDKILTKREKYKIFNKVAFLTKSLENNLVFGGRNLLQKITREYNKKSDKDEKLLNEYLTEYRNKRNGIPCFITGEANQKGNRFFDFSGLGNSKVIYKPFKGKRIEIEFKLPKKFKNDFLKLSEMVGKKEISLTVSLGLEYIYFTFDEEKLNGYAIDEIERRLDVKEIKRQGYPKEIETLKIKEVYKEYYDRQRERKLVGKIKDRCVAVDLNPTNIGFSILDKTDENISIIHCGWFDMERFCVKTGNASDSKEQRYLNNKRKYELTVVLKKLFNIARYYKCSQFIMEDLDGDFKNKGKETNRKVKNVWNRNLIENIIRRRCNENGIELIKINPVYSSFIGNIQYGYVDAVNASIEIGRRGLFKYTKGTFYPHIRYKDLDTVEAKFGVDVPNGTSSDWVTMYKSLKDLFPDGNEFSHRLRTALNDIPKNKYSMFSMSSHYSKVNYIRFNIKNY

SEQ ID NO: 1655 - protein, 508 aa, synthetic construct
  REGION 1..508: note = Synthetic
MLDESADNYFITNFKTIFNLNEIEYRSLLAQVKSFRNRELTQTQQKQERIELLQDQICNNTSLSKRKKYKYYKSIFKLKKGLGKESTFGGRALQQRLTVECNKKGIERDENKIHELKTELKNKRIIPFCIMGEANQRGNRFFDISGLLTDGYVVYKPNRSTRIGLQVKTPKKYHNEINLLNELTYAKDIPLTVMLSNEYLYLTYDEKYLHGYGVNVKQRNEEVREIKKRGYSKEYQTAVIKEVYKKYYDEQRNKRQAGKIVNRVCAIDMNPEYIGYSILDKIGNGVKVVHCGLIGFSRLMEKTHKSSDSAESKYRNNKHRYEVTMAAKRLMDIVNHYACSGFIKEELGFKIDGGDKSTEVNRKIQNIWYRNLFTNCITRRCNENGVELIEVNPCYSSFIGNINYGYSDATNASIEIGRRGLYKYEKGGFYPAITEVDIRTLEAKFGDVVGYSTVGNWVNIYKSLVQQYKPVEFAQRLRTGINEVKIPYESFSIWSYKSKVDVYTFINL

SEQ ID NO: 1656 - protein, 571 aa, synthetic construct
  REGION 1..571: note = Synthetic
LKLPIIHNSDASFVEDKMKQHGYAFREVLKRLDESSNQGFEDEIKDKFNLTDIEYRSVKSNAETFFKQCETNRKKLLKRIETKQEELDELLKKRNDKKELTKKEKYSVHKLQTLLPRLRSSLNNKPVFGGRKNLQHLTHLHNQYNKLLINLSSSVDEIDILHLESELTGLFDRITKQKEKYVNQRLRSFFIIGEKNYKGNRFFDFSKLNEGLLVYKPKYGTKVNLTVSVPKNKKWLIDKLVELTQTKSIPLSVYISNKSVSISYDDEKLYGWKLDETEKKQQIKEIKQKYNNKEVQTTLIKGVCHKHHLKERELKLANKIEGRCISIDMNPSYIGVSILERDFENEDIERGKHAVKVIHKFCYDLSFFTKKLPKEATKEERLYHKNKQQYEIKEMTIQLFNIANHYKCSSFVMEDLDFKEDKEVNKKGKEANRQTKVVWNRGLLEEMITKLTNQYGIELIKVQPSYSSFIGNMMYNYFDPINSAIEIGRRGLYKFIKNCTGYPLISESTLNTVVRVLEENKKDVSNVNDINMTWTSLFNLGKKCRWRGSLSRVTKRRSMSTKRSCIKVLYC

SEQ ID NO: 1657 - protein, 512 aa, synthetic construct
  REGION 1..512: note = Synthetic
YKLKLKQNINIDEYLKQYSKCFRSIFNNLELVEDKEFNKSLKSKFDLLDSWFIQCAKIEAKTKYEQIQTFNKKKLIQINNINNLIENKEYNNKKHLYKLKNKLSFLNRAINNNIVFGGKTLLQNITKLKQQNKIDEYLAKLKEFKSKRILPIVSIGETPQKSNRKFNFDLINNQLTFKPNNKAKIDLEFICSNKQQLILNQLQEMVGITPISVRLDNKFVYIIFDEQKLNNYEFKKLDYFKEIKNIKDKEIRKNIFKKYCREQEDRKVIGKIKDRFMAVDLNPEYIGLSIMDKKNNKLIYKEAIDLTKLNTKLRLSSKDSKQEKQNNKRKHEITVIWKYIFNLCKHYKVSNFVIEDLEFKEKNNKEFSKEFNRKTKNLWHRTLTINLINKYTNMHGINLIEINPAYSSFIGNLTYDYFDPISASIEIGRRGMCKYEKNNKQFGSIDSINLEKVKSYLLNENVQLDMSEMTIPKLFKVFSENNIKYRNVLVEEGIKENYLSSYKSKAKCYNFI

SEQ ID NO: 1658 - protein, 498 aa, synthetic construct
  REGION 1..498: note = Synthetic
KSYKIVVSEEDKVMLQQMQQRYSYAFRKCYNNMDLTIDVGFIKEIRGKYKISAKAYEYLVKECECFYKRNEATITKRTKLIEELRAKLKKEPLANKRQKINKAIIKLTHSLKHDVIFGGKVFLQNHTEASIEKYRQSRILPLCFYGETSRSGNRFFNLKGLSDGFILFKYEGSDVKINVELKFKKSDMLLLSKLEELALAKQCAITIKLTSERIYITYDEALINGNKFDEKAVYQSIKDIKDKEKRKSLIRQAHIEFENNMLRNKNRNRFLSVDMNPDGIGYSILEKTSDSPEGEFIILNKGYLDFAKLSKQETNKRKYELSIAIKFLFGQLSHYNCAYFVSEELNLNNGDHGNRTANRKINNLWNRTYIDNLFNKYCNIRGIKRIEINPAYSSFIGNINYKTFDPIAASIEIGRRGIIKYIRGAKVIPEFCMSNIVNGLGELPKKIYDDIHECKTWKELFHVFSTAKMSVRRKMKDFIFAGKYLKNKKSTVKILCFL

SEQ ID NO: 1659 - protein, 473 aa, synthetic construct
  REGION 1..473: note = Synthetic
IVYKINVSDNDKEIITSLQNDYSISFRKMYNNIELMKDNNFINSLKIKSKKQIEYLQKEVEAFYKRNEANKNKIISNINKLESKDKLYLKDFKQLQYLKKSFNKKIVFGNKVELIKLSKSIGDKNKWKESRLLPLVFYGETARNGNRFFNLKTLRDGNILFKLEGSDIRIPILFNNKKHKDDLNKLQILLLNKTIPITIKLTSNTISFTYDESILYNTKLDIKSFYKEIKHIKDKTIRKDLIANKHKEHEETLKLGKLDRYLGIDLNPDGIGYSITNKKNNIISKGYLDISKIYDANKRKYETSILIKELFKLIKHYKCSYIVTEELNLNNSDLGNKVSNRKVNNLWNRTLIKELINRRCNETGTILIEVNPVYTSFIGNIVYREYDPVAASLEICRRGIYKYSKGGFYPEIDITNFINDERYDKIKECLTWKDMYSLFITSKWSYRRKLIDFSFIGYHLGNEKSMCKHILFK

SEQ ID NO: 1660 - protein, 432 aa, synthetic construct
  REGION 1..432: note = Synthetic
IKLPIQNLSKENISFIKEIQRQQSIVIRFAYNRFSENKSEKEIRLLVKKLNQINFLDSWLIQSAIKEAEQIYKSSKDKTILFGGKLNWLNYIKKKISKEKFKENRLKDIVIQGEASKTGNRKFELNIDDNSILFKFNKNNHIELKLPKLRKNYFKLLSKLQVLAENKEVSYSIKLDPEFIYISFEEFKKEETILNKNRVFGIDMNPNSIGYSILQFDKENNYKVINSGIINISNLTKDLKVSSDNPKQIYQNNKREFESFEICKLLVNKTKEFNCSKFIAEDLEFKIKDKKFGNKFNRLVNNIWNINKFQNNLNKRCNIEGIEFVKINPAYSSFIGNLENINYPDPISASIEIGRRGYKKFEKNWFYPKLNVENLKNLWKEEINWSLIKDWKQLFEQIKNLKLKYRVSLDLSKFKVFRNKCERSLVDLLCFV

SEQ ID NO: 1661 - protein, 482 aa, synthetic construct
  REGION 1..482: note = Synthetic
LKLPYEPTEGLAQVLADQRRRQGRLIRSAYRLLASGLAQRDLYQALRSHPVGKGLHTWLVLSGIKKAQALYARFPSGRIVFGGRRAFLERAQGRMSREEWRSARLMPLYIEGHAKSYGAQGGNHLITLDIASERVIYHGPDSRDFTIKLRLSRKSRDYRRRLAQLQARCEALRDVPFTVSIDGTEIALTWAEPAVPSACGISGRVLGLDLNPARLGWAVVEKGPTGPGSCRCVSWGVFEYPDFSRRLGFASDDPRSVAHTRKRRFELAILAKKVALLARHHRVSAAVTEALRFWPKDHGKGRRFNRLINQVWFRRGLLEPLTRRLASAGVARVEVNPAYSSKMGNHLWADALRVPDPACAAVELARRALWPLRFPAPQRDAAQLPKPNARRQRKDGARARPRKGPALGGWQGVWSQLQPKAADARRRSRADLRPLLPAGNPRLAPLVNPRSRVLRYEPREGASLPFGRDLYALCMGVRSIAD

SEQ ID NO: 1662 - protein, 462 aa, synthetic construct
  REGION 1..462: note = Synthetic
IKLSYTTAPQAIEVITQWRKAQSVIIRTAYNRVQEGKKDKEILALLRAMPQGRLDSWLTLSALKRAHALHRANPKRAVIFGGKHNLQLRAQGKLTAAQWKAKRLQPLYFEGHAKSYGEQGGNHRFVLDIEQNKVWFYPKAKVGLPLQIKLGKRSNYRELLEALQFRCTWHRDVPFIVSLTETDICISWDEKVEPLKPKTNAKRVLALDLNPNRIGAAVLERDGKACKPLKWAVYDYPELNRKLGKPSDHPDSVHQRDKRVYELSGMAKEITALAAHFQCRAVITEHLNLETQDHGKGRSFNRTINNQWTRKGFVLPLVRRLEQAGIRHVEVNPAYSSKMGNLLWGWPLLIPDPACAAVELGRRFLQGDPKSSERKNGGNRRKEERQAQASRDAEARAEWKRVWNQLHPQSGDTPRCTLPALRQKFPAACPSPSPFKAPQSLVSRFEPARMAAALRIHMRKNS

SEQ ID NO: 1663 - protein, 387 aa, synthetic construct
  REGION 1..387: note = Synthetic
YYITINVPIHLNNEDYSILSQAMSEYTKLLYRAYQLALGYSNGKKLERRLTRNEIYNILKKELKTLNTRYLLAAIADALKAKKSKLEKKKKLKFLILERLKLKPQIRSIGRKDRGCASSIRIDFAKKELIINFKTRTIIAKMKTRNYHEKWLNYLKKRVENKEISYTVRIIKIKNKPVAQITFPIFPIIKEISTRDTVIGVDFNPSFLAYAIVDRTGNLIKIGKIKFENDLGNNMSKGERVRILGKGIKQLIKLAKELNATIAIEDLQLYPVINKNKNKKIRQIPHRRFKEILISNSALHNIELVFINPAHTSNIAHHKYHWLKTNEHCIAAFVIARRALGIIEKIPIHFLEYKTFKKMIPVKWEIEKGKVNKTRIAWIGPYARFVR

SEQ ID NO: 1664 - protein, 184 aa, synthetic construct
  REGION 1..184: note = Synthetic
VIKRRDNDEGYDVRITVEVPTEPMEGKRVVALDVNAGHLDFAVMEKESFEGVSVGRVEVHETVRKGKREYRIHEAVDKIGNIASHYDADVVVGKLSTGDFKSKSKRANRKVKNMPQHKFRRALKKLERRGIKVVEKSEKNATKVGKKLSPLVGLDVHKCAAIAFGIKVISSDRFKELMTLLLGA

SEQ ID NO: 1665 - protein, 422 aa, synthetic construct
  REGION 1..422: note = Synthetic
ARVSIPAVITRITPNDREGLEELFRRFGNAKRRAHMLKQRGTSKAEIEHLLQKQVGINCRYAKDAYHSIKDLPPHVTFGGKRNQQLRMEDKIGREEYRRRRNSLIISRGDKTRKGNVNARVVEENSKFMLRINAPPENGMSERWIYPEIFIPEKYLKRYGHMLHGKSPYTVVLKRRDDNRGYDVRVIVKVHKEHCLEPKRVMALDMNAGHVDFAVAEKERVIAVGKINYHEVQHTSHDKTNNLLHKTVNKIRNIAEHYNAKVVYGELNTSKFKSNRGANRKVKRIPHHKLGSILKYKYGAKKRSEAYTTKLGKKFSPLVGLDVHKCAASAFALKVLDYEAFKNLRSSSDENLSRGVAPNEDAGSPRRWLSAGSGPTALHQARGLVHDEVLADGGYSEIPGIWGLSFMGSLRTDLPCLRVKIC

SEQ ID NO: 1666 - protein, 428 aa, synthetic construct
  REGION 1..428: note = Synthetic
PELTIPAHLHQSTPRQAEKLRELMSRFGRARRRAYNLLRKGVNKSEIERSLQEETGLNARYVKDALNSVKDLPPNVTFGGKYNQELRMRHKISKDEYKTRRNSIIISRGEKYHKGNLNLRVIHEDDQLKLRINVGNREWIYPRLYIPRKYLDKYSHLLDGSKPYQVIIKRRDNDSGYDVKVAVRVNPEVRESRRVMALDVNSGHIDYAVLNENLELIQVGKIECQALLHASRYKRENLLHQLVDKIAGIAKHFNAKVVVGKLNTGKFSSWNSRANRRVKQMLQYKLRQILGYKLPLQGVPVEERSEAWTTKLGQELAPLIGLDVHKASSIMFALKIINYEKFEELRSSFKGEELHRGVRADEDDGSPSARLSVGSGLTAPRQAQSLACNEVTTQCDGGYPATPGSWGLSQFAESLKPNLVRKTVKVKI

SEQ ID NO: 1667 - protein, 405 aa, synthetic construct
  REGION 1..405: note = Synthetic
GLKLTIPAYVRGLHPEVEQLMRKFGNCRRRAYNMKKKDMDRLNIIRQLREEVGIPARYVSAAYDTIKALPSHVTFGGLELQRLREIGKITREEYHRRRNRLLVCRGEASQKGNLCLRVEEDGKLRVTVAEKQWVSLPLFVPEKCRPRLAEAPYYTVALKRRDDCSGYDVRITVPVEEPATVNEPNRVMSLDINSGHVDFAVVEKENLTPVAFGRFNCSTILDARKAEKRRRTHLLVNKVRNVAKHYGAEIVAGKLRTLHSKGRSRANRKTQGMNQYAMRQIMAYKLPMNGVRYRERSEAYTSKVGRKLSKPLGLDVHKAAAYAFSVKVIDYTSFTFLRSVHANDEDGIQSMRLNGGSEPTVLHQARVSLVHNEAGLLPAEATPQHKVGAEDTTMSLPTHILQVKV

SEQ ID NO: 1668 - protein, 374 aa, synthetic construct
  REGION 1..374: note = Synthetic
MKWKKGLGRDICIHNLQIQGTPLNIRYLKDAWFTIEHLPPHVTFGGIKNQKLREKGKITREQWEECRNSILVSRGDKSKKGNLNIRIIDDNGNLKLRVNIPFRNPKYIYLGLFIPEKYRKKYGKYLTGNNPYTVILKREKGKIYAKISTVISYNNKESKRIMAIDINAGHIDFAVVDKENKRILSIGRVNTDNKDIYVVAEKIQNIANHYDADIVVGKLNSHKFKAKNCHKANRKINHIPHSKLRIALKKKCAEKGRVVIKKSEAYTSKIGAKISQKTGIDVHKASAIAFALKVLNYDDFRTLKESHIDEGDGSLNMGQIQGCGITSPIQSNIGLDGNDGFMPRGYAQIPGMGGLSILERIKADLRCVQCIKIP

SEQ ID NO: 1669 - protein, 517 aa, synthetic construct
  REGION 1..517: note = Synthetic
MIQTTIFRLFPSETQEKQLHEIFTIYNKAKRKGYNLLLKNARKKGKTIVFEGEKVTQQELMNFCHNNPYVNTILIENKTKLRQQDTWLHKTRDYLKYKIKIIKDKIAKIKTKNDRRPKGLYSRLSSLQNKLINLKISLQNDLLNVRLKPIVFGCKKLFRERILHKINKQDFKIRRDASFGCVGKKQGINKNLKILPTKELRIKTFSKKKGGKWLVIPFSVNEKQERYFQEILMAEKYTAIVKRKLIKNELRYYVHFSYDIQGSKTKYSFKNGAIGLDFNYNFVTLANIDNKGKLLSYNQIDFRNLHSYRKNKRNDYISFKLDKIINYCVNKEKGVVIENLSFNQQFSYDKKLNRKLSNFRNTALELLKRKCIKKGVDVRNVHPAYTSLIGKYNYSRLHNLSTHILASYVIARRGLGFKEEIPPIYKWLLSQVGDKIKPRLKKGSPYYEWSKIYDLFKHSGITSFKTSEIMKKVLLMKDVLNSIKGTRPDNLRAGLTRNGKIKDYHKFWNCVNNFQFL

SEQ ID NO: 1670 - protein, 318 aa, synthetic construct
  REGION 1..318: note = Synthetic
VRIKTFHREKDKKYLFIPFIVNNSQDKWFKEIIKAEKYMGTIKRKIIKGEIRYFAHISYDIPEVEIKYNFENGVIGLDMNCNFASLCNVDKQGNFKSYHQISFRNLHTLRKNSRKNYISYKMDKVINYCINKKKGLVIEDLSFDQQFSYNKKLNKKLSNFRTTALECLERKCLRRGIAIRKIYPAYTSLIGRYKYSRLYNLSTHMLASYVIARRGIGFKENFPPIYEWLLSQVGEFIEPRLKKGSPYYKWSQIHDFFKHSGMTSFKTSDVMKKMLQMKYVLNSVTSEQPDNLKVGLSSTGKIDDWNKFWNFIEIPNVL

SEQ ID NO: 1671 - protein, 441 aa, synthetic construct
  REGION 1..441: note = Synthetic
MQTTITGALYNLQQSEIDQIEFLIRKQNSAKRMIFQDLYKGKNWEEAIKRAQSLITGIPRRYIYSAKEQAKQILDSLRKHQKKVNNKAEKKSKREKIHYTPKILKVIFETKKLLEKRARGLISKEEWRNARNNQLYSEGWKEKKGNLNLRIIQNEGNFQLRITTGDHKWIFADLYIPEKFRALLLEHLNNEPKYTVKILRTKNTKRGSQYLVHITFEVAEAAIVSSFNNGAIGIDINPDRISYTEVDKEGNFISTREIDISNCLNMRTNKTINFLSNKLTELINYSLSMGKGLVFEDLKFKHDESYGKRLNRIFSNFSHRIIVSLLISKCLRKGIQFKQVNPAFTSNIGKLKYSKMYNLSIHQSAAYVIARRGLGFKERISKHFQSLLKRWKQEQVSNWKCWSFLSKKLLSSNKAVLTKRHSNAFKLKLRDQNNILAMEFT

SEQ ID NO: 1672 - protein, 467 aa, synthetic construct
  REGION 1..467: note = Synthetic
ISITLESDIKNIEEVEPILQKYCALYSSIERILFNELKNNSNSSFLFNELQREYIVKHNIHARLFKSLFRKAIGRIQSLKSNQVNYKIQKQVKIKKLYKKLFKCKNRKYRFYVKNKINKLNQQIKSKKEIQSVWGSKKLFKSQWTNEKYINSRDEWENEWKIKRDYNMFVIGSSDENFGNSLCQLQSLKKIRMTLPKSFEEKHLDIVVDFDKSKKIYKYLQDAIANKRALTHRIFQNSETKKWYVQISFSIENECADLNNGTIGVDINYNVISTCRIKKDGNKEQFKNYNFNIDKDDLDNNRRILSEIVNRIVDDALENKKTITIEEINLKHVLKNEKISLVCYNNFISLLRARCIKKGILLIEINPAYTSIIGGLKYQKRFGVCRHQSASYVMGRRGLNYIERVPPEYICLLQSEEKDKSLLDRWGSINKRLQKVSHEEKSLYLHSVYRDLPTCDLESYSVSFANK

SEQ ID NO: 1673 - protein, 519 aa, synthetic construct
  REGION 1..519: note = Synthetic
KTITIESKIHNQGDLYGCLDEFGSFYCFLERTLFNELSNTTIINSDLRKNLKRQYIAKYQIHARLFNVIWNDVKGSIDSLKELDKINRKDLSQKVAKYQKKITQAERWLKRGFRKTKSNPLKPHEIVWLKQNLVQYKNVIHKLKNKLDKPFVPKMIFGGRKFYKSQWNDENYVQDHELWKSEWSRKRNGHFSFIGSKDETNGNQLCQYKNDKITITLPYCFERKHLEITVKFSSDDKTNKQYYNYFHDAYKNKQALSYKFIKRENDTWYVQVSFSINSESEHEFTETIGVDFNYNLIATTEIDRFGNFKRVQNYKFDSDNLSTDQSNDLMSKIVLDIVERAKQNNMSISIEKLDLKKCKQGNTKVTNKKVNLLQYGQFRDKLETKCIKEDVWLKQVNPAFTSIIGKYKYKNKYGMSVHNSAAMVIARRANNYKDKVPSQICRVLHSGGNEFFRIQSTCHHWKHWSYVNKNLEKSLKEFNSATDKFCGKNNLTSRFNPADYVVHPQVSNELTLVSFSNFN

SEQ ID NO: 1674 - protein, 516 aa, synthetic construct
  REGION 1..516: note = Synthetic
LIKTVELKIEDVSVYSILDNLGNYYSHIERVLYNYLYDKDITNGVLNSLKSQYIVKYGISARLFGAMYIVVKGKMDGAKKLHKQSLKDAEVRIKGLKEKIKKCENRLKTSKKLTKKDKDRLWLSVSQWKQKIDRLNQYINFQKPTKMLFGTKALYKKQWTVEKYSKNREVWLKEWRRKRDFHFCFVGSKDETSGNSLCQYHRENDREFLQIRLPNAMIEQCGKYVNFEVATSKPYYSDFHTAVLAGTALTYKFLKKENDAWYAHISFTLEKELQKTITGCSGIDINYGLIANTTVDRNGNFVGIQNYPCDPEFLTSEQMEDLISTQLSEIVNNAKINGYRISAENLDLSKKKLFKYDKITNRKIHMIAYGKIWNLLISKCFKAGVPLIGVNPAYTSFIGHFKYEKMYGLSRHNAAAMCIARRGLGLKDKLPAFIASVLQSGEESKRKTKKASLRTSWSQVYRHRHHWAHWAYLKKNLERCSSVLADAEDPGGSKATFEDTLTSRFNPSYLSFVGRS

SEQ ID NO: 1675 - protein, 472 aa, synthetic construct
  REGION 1..472: note = Synthetic
LTITIETKLEKATAYPQLEVIGRLYNNLKRRLYKRIIKESTSIAKLKKEFLSQYQIPARFFNSIYADLKGQIKSHHEMRRLNQSTISRKIRYLEEQVRQSKEKYVVFQKRRKIYRLQQQLNKPRREICFGGRNFFNKQFTGPEYITNHELWRQEWELRRNGEFTFLGSKDESYGNQLCQLIDNKLRIRLPNCLAVESKYIEVPIEFHYYQDYLKEATGNHKALTWRFKKRANGYWYVFLTFTLDKEVLDDQSNGVFGIDLNYESLAVSETDRYGNWIGSGQYHFSQEDKSSEQSLQEVSLLLDKIVVEAGQKKKNLVIENLDIKDKSGFNRLANRKKNYLLYRKSFSLLESKCTKRKVKLIKVNPAYTTIIGENKYRYRYGINQHEAASFVIARRGMGFKDMVPVQLTCFLPGRIKNRHHWSHWNWIRKNLPTCLKRFNSLSGKGFSREQLLTGRFNRRDLSFVLALSIVSI

SEQ ID NO: 1676 - protein, 554 aa, synthetic construct
  REGION 1..554: note = Synthetic
IVGITEELNFNQLSKLDSFVMLYNKILHKLYVDLFIKKLPIKELCPLYQAKYLISKRHFDSIRKTLEGKVSSILALNKNYIQDTKDKIKSIEKDLSKQTKTYNSYKDKYKKEGKLSLIETNLKFKVHNKIVYNYIRLDRLKAKLLKLEYIRDTGNVRLCFGSNKLFRQQFNIGVNQNPFKSHEQWYEEFNYQRNKEFTLIGSKDKSAGNLNAQITHIKDNLFNLKLNIHPHANKITDKYINLNFKIDYEVNTLINIIKNNNGKNKELWQALTYKLIKQKTKYNRDKYVVSISFEKHLIKQTYTSKNKGCIGVDINQDHLAVSNLDNKGNLLTIYTFNYDLNGNKHQNNNSISLAVKELMLLSTKLNKPIVIEELDFSAKKKNLKSGINKNRNKQLSSFAYSKIIELIKARAEDNYVDVREVNPAYTSMIGSIKYSVRSRISVHHGAAICIGRKGLFNKEKTIKVLDKETNKEVNKKVIKEYKEKRISSRNRQIKSLVLPVRNGLNSVVYWKELKENMVKDKQHEKESSSNVASKSTSLGNSDMPVMNASVGTKS

SEQ ID NO: 1677 - protein, 609 aa, synthetic construct
  REGION 1..609: note = Synthetic
TLTATLLENQDYLIEIKTQLDKVVVLHNHVQRKLYKDIISYKIKNQVEVLPKSKINELKSSYQTKYKINARQYNSIHIELLGKINSVLELNKGYIEDTKDNILSITKAIKSKEKTLSDLVIKMAKDNYVETLVDKNNLAKLKTKLYYLKIKLNKANNKLNKLVKIEKSGNPKLCFGSNKLFRQQFEINKPNNLTQFKSHEQWKKEYLSSRNKSFILVGSCDETLGNDNCQIKHISGNIYELKVNVNPKEVKFKDRFMTVQIKVHNDDKNLIQQAILNNNQALTYRFYKEKNNYRVLINLDKAKQQPKVISNKLLGTVGIDINADHLAVSEIDRFGNLIKSFDLILNLKDKSSDQALDNIACAVKKITDYANAKNKPIVIEKLNFSQKKKDLKDSYNKKYKVMLSSFAYSKIIELIKNRAFDKGIEIIEVNPAYTSKIGKFKYQNKYKLTTHQAAAFVIARRGLLSYEKEIKVTVKRKIKEEELTNVIDNKLSRNGVIINLSKNKKNEYVEEVIESKTITVINKEKTISAQLSKYYCFELPVRNIQRKQNVYWKDIEQSYLKAKKHRFLIKRKKRNLIQGKQDLPCEITQVADNDGANRGSYTNLLFQPF

SEQ ID NO: 1678 - protein, 524 aa, synthetic construct
  REGION 1..524: note = Synthetic
KLIYESPQERAAVNAALDEMCLRFNNAERGLYRDIRHLVGRGVPYPLPAENQNAIKSHFQIKYNINARFYNAVKIGLDGKIDSVLTVADEKLLVTEYRITKATNDLKYYQHVLKEHKNQVLKNEKLIRKYQRKLHYINQRLQRLSSRREKLTETINNQDPHLCFGSKALFMAQFKPGMDFVKWKEDWLFQRNRQFTMVGAKCESQGNQICQITSLKDSRYQLQINPCFNQANREKPFHVQIEVHHDRNNYLKNLPQDDEDRRIAITYRFMKQAITGDYEVHLSFETTRYQPAKITCDTHGAIGVDMNADHLAICNIDAAGNLLHAFNLPYQLKGMTSEQRASVLGDVVKALTDYAQAEKKNIVIEDLDFSKKKSNLKPGVGKAYNEMISSFAYKKMRTLIQSRCFDKGLSFITVDPAYTSVIGRIKYHARFRLTSHQSASLVIARRGFFQQNRTGGFLEKPIRPQCSTKNAASLLTLPVGNGIVEGCMKSRKQNDAYWRELNEQIKAATPEYWAKTYHLTGTVQ

SEQ ID NO: 1679 - protein, 582 aa, synthetic construct
  REGION 1..582: note = Synthetic
TRTLTINTKIKSSAFTADELSFLDVYLNHYNHIKFITTSKIKKKSLDGLKIADVKSLCDKNDVLPYRIFNAGLFQQVQGQIKSQLSNKKNYLDNVQDKIKSVENRLQKQVNTIALINSMTPVMRSYAANRTRLSEAVKKKTVFLYQLERLRCREQKLEKDIANNDFKICYGSADLLSKRNRIHPNDKEKISAWRKQWNALRYGHMLFVGSTDENLGNSNANINIDKNNEFMLNITVPVALKKQFSFSKLSVPITVSYYEDELRNHILFHREGKIKYTKAQKEAAKAEGRTLVSPTSSLSIRLMRNSKGDFDIGIGLQTSHDIKPKIKTVENYGLIGVDINPDHLDIAETDEKGNYLRGWSVPLDLKDKSAKQRKTVLSQATKGIVDYALICGKSIVIEDLDFTKKKKALKDNYNKNYARMLSAFAYGKIREYFTGQCWKLGVNLLTVNPAYTSFLGNLKYRSKITTKNNEHMPAAYVIARRGQGFRERIPSSILKIKKDKAGVITAERILLRKMVLDAGAASGWSKLKHLHKTVSKRGESIDLNTGSVLSKISFLMLGSTGIPLCQELFISSRHASGNNSLI

SEQ ID NO: 1680 - protein, 547 aa, synthetic construct
  REGION 1..547: note = Synthetic
LNSEHLMFLDRYFVAFNLVKRRYARLYKDNRELIKDGKHRKTIKQQCDPDNILPYRVFRGVEQSIKGLADSQQSNRKNYIANKQEKINQVEERLEKEQASLTELLKTPNPSLHKHRLDRRIPKVKKAIYYLKNRLVKLNDQLDTLEQKQADNAFKVCFGGAKLLKQRRSINQNDKQSLSSWREQWFHRRHNEIVTVGDAGDTCGNSNMQVTKEQGEYFIKIAVPESLRPDYSFSFIKVRLDLGYRQDMLDQHIMSHELKKDTAHFIAPRPMTVMLKRNLKGQIKAHLCINNQKPHVITDTCNGTIGVDINADHLAIAETDKHGNIVSHKTIPYDLSGTSGQNEHILSLAVQQVVDKALSKNKSIIIEDLDFKKKKAQLNAQNKTEHNKKYNKMLSSLSYYKITELFASKTFRVGVELIKVNPAYTSQIGQVKYRDKLNLTVHESAAYVIARRGQGFKEKKPKNILRIRKELPKMYCRDHRPCNQIVALLDKKLQAKSMSVILSKVFKKPDWKPLLGDELKAHHQSLPTRILDRWSVLPYNRECYLTY

SEQ ID NO: 1681 - protein, 534 aa, synthetic construct
  REGION 1..534: note = Synthetic
HQVLTTQAKLTLNEQQTAALDAYAELFCRSKRRYTALMQRGELVGLKRSQIRNLVCGSDMAYRQFKGVESAVSGMIESRKSNSKNYITNIESKIENRTKRLKKNLNRLLSPRPTDDVNKLAFDFYQQQRGIDVLHGRLSKLKSGDMSFCFGGKTLLRERNELESPTEIAQWKKRWHDARHDEFVLVGSSDESWGNMNCQVIPQDDGSLTAHLTMPPKLEQIFGKHQKFTVPLRYYYDDVLGALAGRKTPLTYRFKRKDGAWYVYISFRLDAPDVITWRSNGALGVDVNADHLAVTLTTGDGNYHGSWTMPLALRGKTTAQRNDIIGNAVKKCTEIALENGVPVVIEDLDFTKKKRALDKTFPEQARMLSALAYGKIKQCFISRCARFGIELIKVNPAYTSQLGEYKYQDRYGLSRHHAAAMVIARRGLGFKESSPSKVFQFNNGSVRLHCAQDLMRIGKDKFGKTIIDAKNRAMKARDGYVLDTDNVVLVLAENTISVKRLSFMLNRHDQGCGRNQYLPLLTKLRIEQELCDQV

SEQ ID NO: 1682 - protein, 506 aa, synthetic construct
  REGION 1..506: note = Synthetic
TYLTYPAKLSLSQEQKCFLDDYAVLFGEVCRQYYAALKSGRCKSRKDYHVFTGQRLPYRVMRGVEQHLKGQIKSQETNRKNCIAQDENKLDTLKGDIAKLAKKVVGQKRSGQDHSKTSQSLFQKRRRFKRLSARIERMRSDKDSHICFGGRKLFKARHDASTKDGLVDWTTEWLDKRHSEIKLVGSHDEVLGNSNCQMKTAGDDFAVSIAVPELLREKYGTRVTVDRLAIRSDRQGYVRNAVLINQYSKKEGGTPISYLLKRKKGQWYIHVTVRLPEKERVSDSELGAIGVDINADHLAISETDGAGNLLNYWTEKLPLRNKTTDQRLAVIGDAVKEVVSIAEAARKPVVIEKLDFKQKKRQLHKENPVYARMLSSLAYEKIKSLIEVNCAKRGLECITINPAYSSQIGAVKYKEKYGLSTHHAAALVIARRGLGFWDRPLRNYYQTKDRVVVSHPAPVRKTGSAMPYYREFFSWKRRLLREIGTGMRFGEAVALTAGTQRRSLAS

SEQ ID NO: 1683 - protein, 529 aa, synthetic construct
  REGION 1..529: note = Synthetic
CFSQTFKTLQKNIDLDDQLILDEMILLFNKEKRHWFNYNDKSSVGRKKFIHNQAKYYDNEQYSYRFFQGIRQEILGMEKSIISNTKNYIIDKKSKLKSQQTNVKNASISYKTRKKNGDLKENELFFLQQKYKKQYYLENNIKNLEDTLKRDKLSICFGGKKLLNERNSLTKVDDIEEWKNRWFNARNNQMLFIGSHDESRGNANCQLSYNLNSNMFSLKIRIPDPLENKFNKKYITINNISIPSYAYEQVKMEVLKHQTKDVDKEALSFRLIKNDKGYALNITINAKKEKIITSNYNGLIGVDINPDNLAITEIDSKGNLLNSFVLPMDLKSKSQGQRQNIINDCIIELKNYALLKQKDIVIEKLDFKKKRADLHKNKSPKYAQMLSSFAYQQIINGIKVNGYKFGINIKEVDPSYTSVIGKNKYAIPLGLSVHQSAAFVIARRGYAYKEKIKQIFQTNKKSEVFTLLVPEGKQKLEDLKSSRAFTSWLNGKFGKAFCITESTNGAERYVPHNRLRVGSECDSDRMKVA

SEQ ID NO: 1684 - protein, 516 aa, synthetic construct
  REGION 1..516: note = Synthetic
SFQLTIKTTQIVNDNHKDILYESILLFNLHKRYYLNFNQGTFTNEKQKRTQFMHYQKRAFGYLPYQYRFLQGMKQEIGGMKKSIESNNKNYILDKETKLNQVNTTIKSVSKSYKKEKNRKKDFDTDKLAELKEILKNLYTKKQNIENDINELKKKKISICFGGKKLAKKRHRVKETELKAYREAWFHKRHNQMLLVGDHKEAKGNSLCQLSYSEETDTFSLNYKIPYCLQTKFNQESITIENVNIPAYQREEVKQQVLAHKYKDKKREALSFRFIYDKTNTFRLNISVNIKKPKIITSHYNGLIGIDINNDHLAVVEIDRHGNFLECIKLPLDLENKTTGQRNDIIGKTLIKLKDYALLKNKDIVVEKLDFKNKKRELKDRNQDRKYNKMLSQFSYQKILNGIDMIGNKYGIRVRKVNPAYTSLIGEVKYSNELGLSIHMSAAYVIARRGYEYKEKIRKIIHIKRQKAVLALPVPEEIRKDVGWYKVKNLKKKVDQINVGKYVPHNKRFEEIRIFC

SEQ ID NO: 1685 - protein, 527 aa, synthetic construct
  REGION 1..527: note = Synthetic
LFTKTYDTKQTLAPKQIQCLDAIAHFYNHHKRKYNKVGVYNEKTRKQYVQNARFEDSNGIHQSMSYRFFRGIMQDVVGLHQSIQSNRENYLIDKLDRLESVNEEIIKLKQKYENLIKNQAKVFNHEFKNDKDKLLKVIRAKYKKRQYLLNAIENLRDVTNYNLCFGTKKLMKQRHRIKTKKALTLWKKEWHLKRNGQFLMVGSWDETNGNSNCQVIYHNKTKQFSLRLRIPYELESSYGEYLTFENIAIPNYLKAPLIHELNKHQAKSSNKNALSFRFIKLNDSQYRIIFTLNQDNVDIVTHSNKGVIGVDVNADHFAVVEINKIGAIQNSFSIPYHLEGKTKHQRKAIIEDGLKQIRDYALKRKKDVVIEKLNFKQKRQQLYKNVNKKYARMLSAFAYQQIQQGLMQLQYEYGIKVHPVPAAYTSLLGQTVAADKSLTIHQAAAWFIAKRFYKIKELIKQKFKIYHRSKPFMVYIPREIYREHNLSKLGRFLSDVRNYIGGSLSLKKRQSLKDFVVPFNDTTAISS

SEQ ID NO: 1686 - protein, 650 aa, synthetic construct
  REGION 1..650: note = Synthetic
IYYTVSTRTPKAQDALVNRVLDFECKLFAGATGAVLNDIKRRVLAGEKLDELKPTSYKTPVSRHFEISTTTAYCAANFALAMYRSRDTNTREQYLPKAKNDLAKAQRNFKSLQRRLKKANSELKELRSANSHAANIGRKVSEITRLRLKISGSNRRRQITATRVARLEREIETGQYSICLGSKKQFKARSNLNKNGYSNHESWAQDFQHMRLSGCNFIGDPTAKGGGRQFGLYRDTSGYKLMFTLSDKAREKFSNEINSSEYKQFFTKKDLVIKNIGFARSKDLETVEHVLGLHKYRSDKEKAFTDYKKKNPLEVKLSEYRHKYIKDVVKDLKAKAKDESDKALAADLREQASLLTGLLTDFVYTKDQFSKGSGCSVSPKLLRDHKGWRFDISFELECKPQAESYADMKVIGVDTNYDHFAAAVIGENGRFESSVTLPITHVHNGKIDNDAIWIQAAAIVEEAKNASASIALESLSFVKKKQELYSAQNKRYNRMLSSFAYRFMTDAIKRKALESGVEVIEVAPAYTSFIGRALFNELTGSVHESAAYVIAVKAQNIQLKSLKKQQTAFDFSKIKIPVFKKGRMLDIFTNNTYRADHVDEACRSSLVKVPELFYKFKQFETEQYRRSKAQTKLWRDNLSLTKTYDLEIPF

SEQ ID NO: 1687 - protein, 554 aa, synthetic construct
  REGION 1..554: note = Synthetic
KEYITYKTYYQNNNDNIFIQDCMNLILKYTTKRFAYLKKHNLLGTYDKDDCDDYRKAQFYEDENKVEHLILDARYARAIDKSIQAKCDSLIKCKQNNLESKLIKLEQLQNEFDKAQEKYHNSKVSKYSEKEAYKNLEYKNKVLQKITSKIETLQYEINNKIYNGIVFGGKKLFKEQFKENINFEIWKEKWHNRGNEFECGGSKSENYGNKQFQLKFSKTIKNKHYFDLHVNVPYQLREKYGSVYILKNIYFPRGNDILKQNHDNNVAYFKDLNNYNNLKKKLEKENKSITGLQKPNIDDYYCDTVSFLIKKHYNGKMGIHASIPRKIKQVITEDRKGVIGIDINYDNISLSEINHLGKLLHSKVYKFNFGSNNKSGYREQMINKAIKEIVLYAKEKKKHLVIENLDFFKTKMKQLKKIDKKYNRMLHSLAYAKIKERIRINCLLQGVVSKTVDAAYTSMLGKTLYTKKYGISVHQAAAYVIARRYYKLEEYYEAPKIEFIYKDKSCSLTIPVDIYKKQDVNKKAKTTNFYKELYRWLSSEFKAPSRFYKKALTS

SEQ ID NO: 1688 - protein, 222 aa, synthetic construct
  REGION 1..222: note = Synthetic
HSFTHNLKKALMLIILKKNGEFGIHASIPRKIESSITHDRNGVIGIDINYDNIAMSEINKVGKLLHSKVYRFNFGKTNKSGHREQMINRHIKEIITYAKEKKKHIVIEDLDFMEAKNKQLKNIDKKFNKILHTLAYAKIKERIRLNCLLNGVVFIVKNAAYSSMLGKTLYAKKYGISTHQAAAYVMARRYYKLEEYYQTSKIHFIHKDKACSLIVPEDIYEK

SEQ ID NO: 1689 - protein, 572 aa, synthetic construct
  REGION 1..572: note = Synthetic
KDYSTYCTHVSLDASTEAAVHDFMQAWLHYQTHRIVHLKKHGLLGKYDKADCDRYRKTQTFKNKQKQILETFDARYSRAMDIDLQARAESSLECKALEIEDKQIKLDTMKKEVAKALEKYKNRQSITHDDNRELLHQAYNHYYRLLGKQQRLEGRIETLEKEIQMQKVKITLGGKALFHQQFKKGVDFKAWQQAWANRGDRFGCGGSKSEEFGNKKMHLTFAKDYDPASGKRPRFDLRIILPACLQEEHGPFITFRNIVFRYGEAVIKQSVMAHQAYRQAKSDHEKAKRKINKLVDEHEKEQALNVLGESPKADDFGVLSFAFQVLRKDKGYYLHVSVPKVPKPKKTHAQNGVIGLDINYDNLSYANVSKGGQLVDSKVLRFNFGPKYSAEHREQMINQHLKALVNEALAKKKDIVLERLDFTHKKSLQTKGLDKDTNRMLHSLAYRKIKENLRRLCLDNGVGYREVNPAYTSMLGRFLYTKRYGISTHQAAAYVIARRYLNFEERFYSKNLSFVYKDRSCHLELPEGMIKEQDKLKPFQFWGKLYRWIAAEFKAPSRFYQPTLCSDSSPAC

SEQ ID NO: 1690 - protein, 575 aa, synthetic construct
  REGION 1..575: note = Synthetic
RNLATYMTLLNTNDGHSCVLNEIMQEWLNYQTNRFAYLKKDNKLGSYNKKDCDIYRDLQTFDSDINGIFKGKKTTKFDARYSRAIDINIQARCSSLLELKKIEIEDKEIKVETINKKINKVQTKIDNVKKNPWFKVKNQYDRISLNTLKNKLVILNNKIESLKLDIKEKRFNGIVFGGNNLWKEQRKKHIDIKYWKEKWKNRGDEFECGGSKSEEYGNKKFHLSLSQYSKENPSKRAKFDLKIMLPYLVQEEFGKSMTIHDIYFENGEKLILDNVKNHEQYKNDLSNYNKEKKKIENIENEELSLKLLSELGEKPSNSHLKSFYYLIKRKGKKYYCHVTIEKDTIKNVTSDKNGVIGIDINYDNIAFANINRSGKLIYSKVLKFNFGHKNSSSHREQMINQSIKELVQYAKRKKKDVIIEKLDFSFKKSQSMKGNESDVDYNRMIHRLAYAKIKERIRIQCLENGVKLIPINPAYTSMLGRTLYTKPHGISVHEAASYVISRRHFNLKEEYKERKISFLYKDRACEIEIPERIFKEQEKLTSFKFWAKLYAWMKKEFKAPSRFYKKVIKSEALSC

SEQ ID NO: 1691 - protein, 643 aa, synthetic construct
  REGION 1..643: note = Synthetic
QQFKTYKTHVDSDKATFDALNHLMQCFLNYKTKRFAAIKKDNITKVDTKKADAFRQTQTFINDKGQRKDTFDARYSRTMEKSLFAFTSSRKACQTDAIFLKEGKLERLKDKYTKAKNKYRNYKHHSSHDWQGVKERRNRMNFFHRKIQQTQSTIQSLQQMINNDSKDNIVFGSKALWDKYNTFIHNPEASKEKKEKLKQQWSMRGSEIECYGHKGEEYGNNNIRLKKCANVDYDALRLKNKQIEETNKNKKKGKKQKNKNQKQKKIAYPFDVEIKVPPVLQQHYGKFITLHNVKFYYGKEELLDNVEACEQFQTDLRDYTNEKNRYNNAIKKLKKQLKVIDNDDDVKLIHHQIKTIEARIEKNEETKPLADTYGCRAFSLLINKNVDDRLSVHVSVEQREHDLITHDKNGVIGIDINYDNIAIADINKVGQLLSSHVYRYNFGQTHSSIYREHHIHKAVNAIIEKAKALKKDIVIEDLDFIKTKIKQDKGINPKHNYKTHSFPYAKVINKFLTEGFLHGVKVHQKNPAYSSLLGKICYTKAYGLSTHQAAAYVMARRYYGLKEKIPPRLVFNHRGVSCSVSLPEDKVHTHVRKKQHSHYIVNNELNIQSLYQWFKKIVLAYQQFPLTKFDRSNRSWERSPSIA

SEQ ID NO: 1692 - protein, 505 aa, synthetic construct
  REGION 1..505: note = Synthetic
KRIISIMTGLDPDKKQQDILSEIFRVVNSYKHRFFKQSLVNPSLTEKDFRHEDNRLDRRWSRSVEEDVVGMKDSIQSNRKNYLADKKDRLVSLNKTIQKISHKYHNALTFPENFSQQLPGLLKTLRFHYRKKALLEQSIRKLNYDLQNHRFSICFGSKKLFSKQFNPCVTHSDWQRQWQESRYHSFRLTGAKDETCGNANAQLHFVKNNCYSLKLRIPLVLEKQYGKYLAIDNIHFPEKTQSFMQNIILANNDKSSTARQPLTISVSKIKGKYRLTIQCTPEKVDVVTTDTFGVVGMDMNADNITVADIDRNGKIQETKIFRFNLNGKSTGQRENIIIEAINKAVDFAQSKGKDLIYEDLDFSQKKQQLYKSENKDYNRMLSSFSYLKMKTQLLSRAYKCGVRISKVNPAYTSLTGRLLHSKRYGLSVHEAAAYAIARKYYEIKEIIKKIITLNVKGKTFMFTVPEKILKSESRSQYRLLQKWFKNLWLSQSTWKLCSSHVNPSG

SEQ ID NO: 1693 - protein, 406 aa, synthetic construct
  REGION 1..406: note = Synthetic
MQSKTYKENFKKKSHFVTYICKKYNLLKRVVNSIVKDVEGNIKKLRELKKYEIKQLKLKIKALIEYRKEQSAKLETLKKRVVNNDLRVLEQYRNLKIKVYYLSQKINKKNLQFSNLERVINNNEKIRLCYGSKIEFKKQYYLQLNKLKSHQSWKNNFLKNRDKVIHYVGSGDESYGNQLFNLIPDGLGYKIKVRKHIPNIEYKYINGYCHLKNYITNTNIIGEMQNFNRPLTYRIIRRKNKWYLQVVVEVEVNIVTRNNEGVIGLDYNEGFIELSETDKAGNLINNKRIIIKDNVKEKLSGILKHALNVGKDIAIEDLNFNGTKGKMIKAKSKRGKIYNRMLSRLGYGMYKEGLINSGARNGIGILLINPINSSKNGAILYNEKKKLTTHQSASYVIARRGMGLKD

SEQ ID NO: 1694 - protein, 462 aa, synthetic construct
  REGION 1..462: note = Synthetic
SKNYTIETRLELKNNEELVSYFENYIRDYNLILRYVWRQLTSPTYKEEYPKKSYFVTHLCTKYTILKRTANSIMYEVEGRVKSLKALKEYEKRQLEYKIGSLENKRNKLSYAINNIKPKVRVNKATEKQLKKYRENKRYLYYINQKLNKKKMKLKQLSYELENNILKICFGTKKLYDSQYRLNDNGFRSHKGWYNTFVKNRDKNIYYMGSKDETKGNQLFQITYNETTDDFYIKLRKENKYTEDSKYIEGICNFKYQREYLKNMLIEGIYPLTYRVKRVGTKWYLQVVITIRNEVNTCLTRSTNGVLGLDYNKGFIELCEINKEGNIVNLKHIKMYHKGCNIKAINEIRQVVSQVCNYALGVGKDIVIEDLNFKKTKAKILKGKGKQGKTYNKMVNQLDYSRYKETFENSCFRNKVGLKMVNPYNTSKIGIEKYAYEKKLSSHQSASYVIARKGQGFLDKLK

SEQ ID NO: 1695 - protein, 460 aa, synthetic construct
  REGION 1..460: note = Synthetic
QFTIETRLELQEDAVKYLTEYVVFYNEISRKLWQIVRLSNFKELYTRSEFNTYACNKYNILKRTANSIYSDLAGKKKSLLELKKTELSNKKIRYKKFFNKKNELINKINKLKEKVALNKSNENELIRYRKYKHKYYFICNKINNLKQDVENLEKDIKNKNIKISFGSKKLFNAQYNLEANGFRTHTKWKNNYHKKRDKNIYYLGSKDETLGNQLAQLDYDITTSKFTLKLRKEKQYSSESKYLNISNIDFKYMKDELINIINDHKSNQTLLPLSYRIYRVKNKWYLQVIITTIVENYVTRKEYGVIGLDFNNGFISFSETNESGNLIKTLNYPLKYHGCGNKALNEMLNTINNIVTYARSVGKDISIEDLKFDSKKANSIKSNQKNEKKYNKMIHTLDYSRYIFRLENKCHKMQVSLNKVNPYNTSLIGYEKYAKNRKMTIHQAASFVIARRYQGFIDKI

SEQ ID NO: 1696 - protein, 245 aa, synthetic construct
  REGION 1..245: note = Synthetic
MFYNQNTDDFTIKVRKDFGFDKNAKYLIDTINFKYQKDLLKQICLAYWNKTSSTALSYRIHRMNHKWYLQVLFTIEYENYETTNQLGTIGLDYNDGFIELSETDEKGNLVNQKHYDLTYHGTGNKAKTEIEQTISNIVNYAKLKGKDISIENLNFKRTKAYQSKAKGKLGKKYNSMLHKLDYSRYKDTLDNCCHRRKVNLIMVNPRNTSKIGKQKYSDRMKLSAHQAASFVIARKGQGFIDKLVS

SEQ ID NO: 1697 - protein, 324 aa, synthetic construct
  REGION 1..324: note = Synthetic
MIQAKNKLVYQIKNNIYSVGFGGKHTFDNQNRLQENRYKTHKKWYNNYVKLRDKNIFYLGSSDETFGNQMFQMTYNSSFDDFIIKVRKENHWCKSTKEIDKYIVVEHIDFKYMKTYVKNIILSHYNKNDKDKLPLSYRFHRRKTHWYLQVMFSIKYDNYVTFSKYGTIGLDYNDGFIELSETDECGNLIYQDHIILKEHGTGNKAKSEIEQAISKIVSYALTKGKDIVIEDLDFKKKKSTTSKSDKNKKYNKMLHLFDYSRYKEIMENSCHRNRVYLNKINPYMTSQIGKQKYSNSKKLNIHQAASYVIARRGQGFKDKYKKIA

SEQ ID NO: 1698 - protein, 470 aa, synthetic construct
  REGION 1..470: note = Synthetic
VETRLQTDSKLVNYLNTAVTEYEWVKRKIFYEMTHPLFKQRYKTEAVFEKHCRKTYGLHSRTINSIVNEVKGIMKAYMKLKKTELANLNTKIKEQERKVKKTIKELNKLKPKVTKNLATKKQLSKYRRNKFSLYHQKNKLNRLNIKYKNLDYLITHSIYKICFGTKKLLKKQYNLSDNKYKTHEKWYNDFIKNRDKNIWLTGSINEKDGNQMVALSYSEPTNTFNISLRKIEKGNYGKYDKNKYIEYNNFTIKYNKQDIIDLINAQKFNLPNKRAIHFRFHRKNTKWYLQIVYTKSFYDTEYLTRSNNGVIGLDYNDGFIQLSETDAKGNLVGLKQYDLKYHGCGKRAEHEIEQIINKIVKYSVLVGKDISIEDLDFKKTKAKSLKSSNKGNTKLNNILHKFDYSRYKQKLKDISFNHKVNLNLVNPKNTSKIAKQKYCNIKKLNTHQGAAYVIARMHQGFIDKLESMVA

SEQ ID NO: 1699 - protein, 583 aa, synthetic construct
  REGION 1..583: note = Synthetic
RLLTITFALFVFSIPLLSVVNGQALSDVLKDLRSELKMVFEQRTQEQKQFQENYDREHKRMVDIITASNELSLLLYTQESDMTFDLAYALNKVTSAYKDFSKDRKPYDRFVQELNTEIDRYARLIEALRRLPPVMKEIEIEIVPDSLLYHNDSLDQRISDISSSLEKEVIRIAIKDSLSSPFVLDEEGEVHRDSCIRYASELLKMYADNRDVMVADSSHYQAAYWRMKEAYDYAQSRYRELEKYHTLKQSLYWQKNRLNRLKQRKAGLEYQIREKVYDMCYGSKEMFRRQHRLMENGYKTHEKWHNDFIRSRDRNIFYLGSSDESFGNQMCRLKYNSQTGFFTLELRKEYKYCTDKKACSKYIRLGGLDFKYMKDNLAEILESYDTAGNGSYPLSYRFHRTGNRWYLQAIFEQSFTDYRTVSKYGAVGLDYNDGFIELSETDSSGNLTGLKHFTLKNHGTGKKAEAEIRDVIAEITGYAEKRCKDIVIEDLDFKRKKACGTARSGKKSRKYNRMLHLFDYHRYKQTLQNTGFNHRVNIVIVNPKNTSKIGKQKYCGSRKLNIHQAAAYVIARRGQGYNDKLTA

SEQ ID NO: 1700 - protein, 459 aa, synthetic construct
  REGION 1..459: note = Synthetic
TYTTETRLSKGSEITKYLDMYVAVYNKLYREMWHDMTSPSFKELYSKESEYVTYMCGKHQLLKRTVNSIRNDINGTMRAFKELQKENKRSLKQKVSKQQTKVNKLIEEVKALKKKAGKNKATEKELEKLRQKKSSLYYQRNRLNKMKQRLVKIEANIDNDRYNIGFGSKKMFRKQFRLKENGYKTHEKWLNDYRKARDKNIYYLGTYSEKAGNQLCQLAYNEETGLFDISLRVEDKLLKLPYKQVKASGISIKYMGDEIASILKEKSRPLSYRFARRGNAWYMQVMFSIEKCSTDTRSKDGVIGIDYNEGFLAITETDGCGNLVGRDRYDLYFHGTGNKAKSEMSQVAARIAKEAHAKGKDIVIEDLDFTRTKAKMIPARSKAGKKYNRQCHLFDYKRYKEFMQGACFKRDVGIHLVDPRNTSVIGKGKYAKQKKLTVHEAASYVIARRGQGFTDKVPA

SEQ ID NO: 1701 - protein, 455 aa, synthetic construct
  REGION 1..455: note = Synthetic
DRVYCLETRIPNSEAEYFSKFTPEFATLCRRIWQDLKHGVNTDSKYVTTLCHKYGFMKRTVNSALRQMKGRANALKELNKVQIQEKIAKINALNDKIAKIKDEINALKTKVVKNPNDKQLLTRYKNKKKKLYSWQQRKLRFQNNIRDYEADESRKYNLCFGSKSFFSKQYNLAENNYKTHEKWLNDFRKLRDRQLYYVGSSEETAGNQMCQLQYTPETDRFMLKIRKEYKYCKSNKKNEKDNYVWLDIDFKYKKEMLISALENNLPLSYTITRKGRKWYIDVAIKQSCEVYTDTSNGCVGLDYNNGFIALTETDRYGNIVNVDNIPLWNHGTGNKAKSELSEKISKIIRYARSKDKALSIENLKFRKTKSQQIRKGKRSYNKMLHLLDYGRYKQLCQDYCATYGVMLKMVNPAYTSKIGKQKYSRTRKLTVHNSAAYVIARRGQGFEDMYIKKAS

SEQ ID NO: 1702 - protein, 441 aa, synthetic construct
  REGION 1..441: note = Synthetic
WRIFTLETRLNKQDAEYFEQYIGFYCKVYREVWQDYIHGEALSSKYITKICQKHNMLKRTVNSIIRDVKGRYNALKELQKQQCADLRHKIDFLCNSIDELREEIGMLSKLAGQNKLDAEALQSYRNKKKRLFSLQRKKLKYQNKMDNMGKLSFGSKEFWHKQYHLKENGFRSHIGWYNKYIRRRDKCIYYIGSSDETCGNQMFQLSYNKDLNYFQCKIRKENNYSSESRYLYIDVDFKSPRRDMLINTLECNDSMSFRVLRRDKKWYLQVMFSTDFEVLTDKRNGCIGVDFNNGFLAVTETDKQGNIADIDILELRYHGGGNKAKTEMEGLVKKLVFLCKNVNKALVIEDLNFSKKKSSILSKKNKWYNQMLHKLDYSRFAQLCSNCTAVYGVEFIKVNPAYTTKIAKQKYCNQRKLNTHIGASYVIARRGQGFKDRLLAY

SEQ ID NO: 1703 - protein, 447 aa, synthetic construct
  REGION 1..447: note = Synthetic
YAVSTRLDMTDELRRYLEDYIAFYNSIERRVFYDICHGIPSEMGMSRYISHICSSYGILKRTANSIRFDMQGRINAYLELKKTELSQISIKIQSIRKKIVKLESCVSEFKPLARNNTLDKKGLSEYKNMRSSLYYQKNRLNKLCQRKSVLEQQIKDKAVSLCFGTKKLFDAQNRLDGNGFRSHDGWLHIFQNRRDSGVFFLGSSDESCGNQILQIKPCEDGFLMQLRKDKPYEVDGKHLFTNIKFRYMENEIISALGDNRPMTYRISRKGRKWYLTVMFYINTNIITDSESGVIGIDYNDGFMELVETDKSGNMVNAEHVSLECHGAGSKAESEIKEKISRIVKMASSKKKDIVIEDLDFKKKKAKQNKGENAGYNRMLHLFDYHRYAFWLENLCIKYGVRLTKVNPAYTSVIGKKKYSNSRKLTVHRAAAFVIARRGQRFCDKLAA

SEQ ID NO: 1704 - protein, 313 aa, synthetic construct
  REGION 1..313: note = Synthetic
MEKRGYYPICWGSRQLFRAQYYLEENGFRSHEGWVNAYRRKRDGQVNFIGSKEEPMGNQNCQLSYDRERDCFSLRVRKDLEFMEHEKDKFFVISGLQFSLHREQLIRAIQERCTPFTFRFLRRGRKWYLQVIFTWVMEERDRISDVSCGVIGLDFNDGFLSFSETDVYGNLIGLRHFPLKFHGMGKKAESEMQETIAKIVRLAKEKRKPIAVEQLDFKKTKALTTKTRGKYGKQYNKMVHALDYSRYKTCLENAGFREKVEIVLVNPAYTSQIGMEKFGERMKLNRHQAASYVIARRGQGFQDKLQKKIRKVG

SEQ ID NO: 1705 - protein, 467 aa, synthetic construct
  REGION 1..467: note = Synthetic
KKNFTIETRLKWNPDVMAYFKSDIKKQSKLFRIVWKLVQTSGLKQSKLNTYLQNKNHIDKRTANTLIQSAKGRLSALKALKDTELADLRNKIGAIEKRIDELKVLVADDKELVKDNILKGYRLIKYRRNKQELWQKTQKLNRLRQKASKIERGLKEPVLPLCWGGKKAFKAQYNLGENGFKTHEAWRNWYRLKRDGQINFVGSIGEPQGNQNSQLNFDGGTGYFSLKVRKDLELMADANDKFFVLDKLEFKYQRDKLIETVKNDKTPLAARVLRRGNKWYLQIIFTWEAADIQTNRLYGAIGLDYNVGFIELSETDYYGNLVYQEHVGLEKHGSGNKAKSEIQEKVSAIVKQALNKKKPIAVEDLNFKKKKAGRLPGAGKRYNAILHAIDYSRYKDVLENAAFRNNVGLIYVDPAYTSKIGVKKYQEKKKLNRHQAASYVIARKGQGYIDKWQSNTKNKDSKKHKAL

SEQ ID NO: 1706 - protein, 488 aa, synthetic construct
  REGION 1..488: note = Synthetic
LNVVTEGRLSTRAAADLINYFDDYAGPYSCIYRYVWSVLVKGRSNEPELLNGEGQVSKSKLNTHVQGRFGVSKRTANSIISDAKGRLRALKELKYTERRQRGVKIRELEGQISKLNAKIRKLNPVVAANGATDKEIRQYRKWKETIYWKRQRLNRYKLRLDRLSELIGRGVYSICFGTGKLFAAQRRLSENGFRSRQGWYNAFVKNRDKNIFYLGSKDESCGNQMFQLEYDSKLDMFKAAVRTNNDGEKYINGYVNFKYQRDRLIDQLAKNTAGAWKVKEVLPDGKVKFKTVYSGDETALSYRAVRRGNKWYLQVILTLTRNGHDLATDMKNGVFGLDYNDGLIAAAETDAEGKLTGMHEYWLGFHGTGGKAETEIREIVAGIVYKAKRAGKHIVAEDLDFKDKKSKQQKGGKAGYNRMLHLFDYGRYRDTLYNSCFRNNVGLAKVNPRDTTKIGKERYCNPMKLSPHQAAAYVIARRGQGFEDKLAN

SEQ ID NO: 1707 - protein, 466 aa, synthetic construct
  REGION 1..466: note = Synthetic
HNLTIETRLDPKESGSLIRFFEEWRTEYGRMLRYVWHRYAARASRPGQAAFNTHLQQHFGITKRTANSLIYDAVGRYNALVELKKTEKVHLETKIATFKDNIKSFKEDVDAAAKLAAQNKLSGKQLESYRKKKKSLHDKRLKLNRMENSLASLEKSIASGKIKICFGTKKLFHAQNNLEENHYRSHREWYRAFREKRDANIFYLGSKGETQLNQMFQLFPEGNGQYRIVCRKDGKYAPSSKEKLAFGTCRFSYLSEKLAGQLESGYKGISYRVHFERKKSCLQEKIYLQAILSVPADYQPETTMVEGAIGLDYNDGFIQMSETDRAGNLTGQKKYVLAFHGTGAHADTELKQAISEIARHALRKGKSIVCENLDFKNTKSRQMKGRSRKGKAYNRMTHLLDYKRYKECLKNAAVRMHFDLVMVSPVNTSKIAKQKYCNRRKLNGHAGAAYVIARRGQGFHDKLQKA

SEQ ID NO: 1708 - protein, 458 aa, synthetic construct
  REGION 1..458: note = Synthetic
FTTETRLSNKDASGIIEYAKQYAPDFGLIERYVWHYITSHQGIPDKAKLNTDIQNRFGVTKRTANSAIYDMSGRYRALKELKCTECSQYRQKISALQGKINKLALTVNTMKAKAASNQLPEKQLVTYRKLKKKLFYKKQRMQKYKDRLARLESDIAAGRYTLGFGGKKLFDAQYRLEENGFHSHQGWLNAYRSARDANIYYLGSKDETSGNQMFQLSANPDGTYRIQIRKDGQFVSGKDKYVTATCSFRYMNAEIRNSIKDHSRPVSYRLKIRGSKVYLQAIVQLDMSIRPIVTNMCDGAIGLDFNDGHIDMAETDRYGNLVNTTVYPLEYHGTGTKAVNEMRTVIAQIGRYALSVGKSIAKEDLSFIRKKARTNKSTRTTDKKYNKMIHTLDYSRFEDCVSNMAVRNGIDLVEVNPAYTSQIAKQKYAGTRKIPVHNAAAYVIARRGQGFKDKLILT

SEQ ID NO: 1709 - protein, 468 aa, synthetic construct
  REGION 1..468: note = Synthetic
SKSFTIETRLNQKDNAEIIEYAKEYSVLYGQMIRFTWHRIKDGGQLPMKKSDFNALLQKTFGVSKRVANSVIYEVVGIYKSLYQLKWAEFFQLKAKIAKTHKKYEKLQQKVYVLKEKAKSNSLSDGQLSYYRKLKADLFHVKQKLNCMNRSLKNRLAVLNSRKLEVCFGSKKLFLAQYHLAENHMTSHKIWYEAFCKRRDNRALYIGSKDEQRGNQLVQLVPMVNVGKGNSYAIQIRKNTKEREYVRGTCNFKYMGGQLAKLIIDKTHGITYRIKFRGKKCYLQAMIIIDRNSSDCVTRSTYGTIGLDYNDGFIEMAETNETGNLVKLKHIDLKYHGTGTKAESEIRQVVSDIVNYAISVGKDIVIEDLDFKKTKAETEKAKSDRGKAYNKMIHLFDYSRYKSTFESCCYLRNVGLIKVNPAYTSKIAGQKYCNQRKLVIHQGASFVIARKGQGFVDEYIKSKKKKTA

SEQ ID NO: 1710 - protein, 470 aa, synthetic construct
  REGION 1..470: note = Synthetic
NKTFTLETRLDRYSSNELMEYFSALVPFYAKIYRSVWQEVMHADEKIHLISGKNKSSYNTYLQRKFYISKRMANSIIADVVGTYNAMLELKKYELSQLNSKIDGSHKKLEKYNLRLGRFKNADINKLSKQDRRTYKWLRFAVWQRLRRINRLKQKRDVLERNIQSGKVSVCFGTKKLFKAQWFLEENGFTSHKEWLKTFRQNRDKNILFLGSKDETACNLMFQLEEMNGLYQIKVRKVENRRINPSGEKYVYGMCKFRRKDFESYLSANLENRKSKDACMPLTYRIVFRGKRIYLQVLFEYKREDFSHTTNVFGTIGIDYNDGFMQVTETNETGNLVRLERIPLDYHGTGNRAKSEIEEKIAKIVHRAIVVGKTIVIEDLDFRKTKSKTQTGKTERGKQYNRMLHKFDYSRYKETLENCCYRNNVELIKVNPAYTSRIAKAKYCESRKLNVHAGAAFVIARRGMGLRDVV

SEQ ID NO: 1711 - protein, 459 aa, synthetic construct
  REGION 1..459: note = Synthetic
SLILPLEIRLDKRLCPEVIDCIDDGLSVYSSAYRYAFSQIDHGQRNLNQLTKDLQYKYGLKSRAANSIARDAKARHQAGLELARVQDKNLRASILRKKKRLKKLKKTVEEKSREAAAGRLGHHELSHYRRQKHDLWLLGQLIPRLEAKLKRWKKDIENRHVRLCFGTKKLFKAQYHLKENGLSCHEGWKELFVRSRDRMMYLCGKNDEKNGNQLCHLFRMEDGSWTIGILPVLKPEKGQDKIITGPVKITHAPGLELLNKTFDGFEAAQPAKQAVSVRILRRKKGHYVQFYLHLPKPEGWSTSSFEGAIGLDFNADHIALCETDRSGSVVYARRISLHGFGRKKHNYDQGIAQMMSAVKEITGEARLKGKDLVIENLDFSGKKTDLQKNRDYNRMITQLAYGRYTQAVKRRCFKDNVDLKIVDPAYTSKKAKETVCRELGINVHLGAACMIARRGLGLF

SEQ ID NO: 1712 - protein, 240 aa, synthetic construct
  REGION 1..240: note = Synthetic
MEDGSWQIGVLPVLKSEKGQDRIITGPVNITHTPGLELLSQVFDGYEADQPMKQAISVRILRRKKGYYVQFFLYLPKQDGWNTSSFEGVIGLDFNADHIALCETDRKGNIIYARRIGFPGLGRKNHNYDQGIDQMRTAIKKITAEARSKGKDLIIEDLDFSAKKSDLQKNKYYNRMISQLAYSQYTQAVKRRCFKDNVDLKIVDPAYTSKKAEETVCREHGINVHLGAACIIARRGLGLF

SEQ ID NO: 1713 - protein, 449 aa, synthetic construct
  REGION 1..449: note = Synthetic
NVYTYTTEIKNREYNIKLMEYITEYKGLFNHIQRVVFHKIKGIYVDNQGEFTLKDKGALVKYVARTYGFTTRTASSIVYNMTGRFNAIKELKEYEREQLETKIESLEKKIAKTEKSREDLNLKMATNIATKEEQEKYKKIKLSLYWRRNKLNKMKQKLVNIENEIGTYNFKLCFGTNKLSQKDYQKFVEQRDSEIFYVGRATEKAGNMNFQMEYNKKDNQFYLQIRKEINTEQDRYVRGKVYFSKSQRKMIKKILRSKESPLTYRIKVKNGRYYLQVIFQYKHNKSMCNNTRNSYGVVGVDFNKGFVAVSETDSYGNLINTFNIKYRFRSGNKTESDFQYIAKILSDYCLEKGKDLVIENLNFDKEKANMVKGDFKIYNEMLSSLAYAKFSNIIESKCAKKRIFLKKVNPAWTSYIAKKKYCKKKKLNIHSGASYVIARRGQGLKDKAK

SEQ ID NO: 1714 - protein, 323 aa, synthetic construct
  REGION 1..323: note = Synthetic
NDYKNFNFIKYRNLKVKIYWKQNRLNTKKQKLKNLETEIETGKYKVCFGTKNLLQKDYSKFIKKRDSEIYFLGRAGDKACNFNFQVEYSSKINQFYFRIRKEIDLDNDKFVYGQFYFNNKIYTNLLKNLLRTKESALTYRIKIKDNRVFLQIIYNFEHNKDLCVTRNSYGVVGVDFNKGFVSVSETDKYGNLINTFNIDYQYSKGNQTTNDFQYIATRLKDYCLNTGKDLVIEKLNFDKKKDNLISKKGKKYNEMLSTLAYSKFDAIITSKCAKNRIFLHKVNPAWTSWIAKQKYCPKMKLNIHSGASYVIARRGMFLKDKAK

SEQ ID NO: 1715 - protein, 468 aa, synthetic construct
  REGION 1..468: note = Synthetic
YVFTYTTKIKNKNYNQSLCKYISDWTIIFNKIQRKVWQQIKAEYKETGEIKGKFITVLSDDEIELTARTKNSIFLNMAGRFQAIKELKNYELDNIDKRLERIEEDITEIKERIQELKYKHESDIFGLSDKEKEELKNTKHKLYWKLNRKNKLFQRRNNLDKEIKEGNFKLCFGTKYLLKNDYNKFVKQRDSELFFVGRTAETGGNNNFQLEYNSKKNNFRIKVRKEISLDDSKYEYGEIYFNQKRTKQVRQILKNKSSALTYRIKIKNDEIYLQLMFTLKHTVEDCLTRSSNGVFGIDFNKGFISVTETDKQGNMIQTYNLDYRFGSGNKTKNDLEIVTGKVVKEALEKGKDVVVEKLDFKVKRSELISKKGKKYNEMLSSLPYSIYGSIVKSKCAKNKVYLHQVNPAWTSYIGNIKYSIPRKMNIHTAASFVIARRGMKFIDSIGKKKMRLKRKKRKKYEKRKVNNK

SEQ ID NO: 1716 - protein, 444 aa, synthetic construct
  REGION 1..444: note = Synthetic
HKFTVVTQLHEKNNLDLIKYIESSRSEYAKAVRKTFYALKASKNFNKSNFNTYLQSSYDITERTANSIILYTQERFNSFKGLKQYEIKQLKHKISYLEEQLIPKLVEKRNSNSKLFKAGMSISLTKQRNLRLKIVAKKAKLNRLKQKLNNLNYQLESGRLKLCFGTKQLLRQDYNRFVEQRDSQMTFIGAKAETCCNQNLQLTYNQRNNQFLIKLRKDLGGYKSAKGNNKYVYGKTYFNHHKDRIISILKNKNSPLSYKVIKKNGRYYLCCTFEIQTDTSNFFTCSDYGAIGLDFNKGFVTLSETNQYGHLVKTKLLPYRFRAGNKTKTDLQRIANDVVKLSQLTGKDICIENLDFKATKSKTETKYGKQYNEMIHSLAYRQFTDIIESAAYRNKVTLTKVNPAWTSWLAEKLYCPIMKLNVHVGASYVIARRGQGYKDTVKSL

SEQ ID NO: 1717 - protein, 251 aa, synthetic construct
  REGION 1..251: note = Synthetic
MNYIGAKCEPCRNQNFSMYYDRNKNQFKIRIRKDFQDVGSDKYVFGQIYFRHHKNKLVEFLKTGDSPLSYRIIKRNNRYYLYCTFELKYDSEVFLTRSTHGTIGVDFNKGFVTIAETNECGHLIESCTIRYRFKQGNKTQTDFERIANVLVGWSLQKGKDLVIENLDFVKRKINTETKKGRKYNEMIHSLAYKKFSEIVGYVAYRNKVWVRKVNPAWTSWIAKEKFCPIMKLNTHVGASYVIARRGQGFKD

SEQ ID NO: 1718 - protein, 340 aa, synthetic construct
  REGION 1..340: note = Synthetic
QFSQKEQEVLSTYFLNKMSNHLKPIPLHAGKFFDGELEIDVALPFRRIFDFEFEYSEATSNIYIAKNDVFSMKKTIQFAKEFINNFTTVVKINGEYLGEIIKETGYMLRLINNPFVYMDSLRDGGRFLIQCDYLNYKRNSERYKEFRFVQEGSYFRNYEKNMKKSLALVTGEMELTKWEFQEAPTFFLGKPKTTAYSYVTLTETNQYGHMVDTDLIRYRFKQGTATQTDLEHVATLVKERALATGKDIVIENLNFKDTKAKTVSKRGKKYNDMLHSLAYRKFIDIMDSVCYRNCIWLRKVNPAWTSWIAKQKYCQKMKLNIHTGASFVIARRGQGYTEKV

SEQ ID NO: 1719 - protein, 450 aa, synthetic construct
  REGION 1..450: note = Synthetic
VLKDQNGYFTILGNNQVLTRCRSRGALKKKTDVLVGDHVEYEANKGFEGVITKVYKRKNQLYRPPVSNVDELVLVSSICTPDLNRGLLDKMILLAENANMSPVICINKCDLDEVSAKRVCEEYEKAGYPCIYTSTYTQDGLDDLKKLLRGRIIVFSGPSGVGKSSILNYFLGRSYFTSGAVSAYTGKGRATTRHAELVPFKTGVFLMDTPGYTLLDIDLLDVDELGFLFKDFRPYLGKCYFNNYKNELIKALQNKNSTPLTYSIIRKNSRYYLHCTFEYRIENKSNFLTRKTYGTIGLDFNKGFIALSEIDRNSNLIGTDILKYRFGKGSKTQSDLEKCISKILKRALETGKDICIENLNFKAKKFKTEKAKTKKGKQYNNMLHSLSYTLYDKLITNISFRNKVNVIKINPAWTSWIAKNKFCNRMKLNIHIGASFVIARKGIGIKDEVK

SEQ ID NO: 1720 - protein, 447 aa, synthetic construct
  REGION 1..447: note = Synthetic
QKYTTVTQLHEVNNKEIIEYFENASVYFCKLQRKAFHRLKNENSTGNKTEEYKKLRKGFMKEHGISSRTANSILKDIQGRMKALEELKKYEVSQKEQKIKKLREDIGKLDKRILKFQERMKDKIKVDHIRYWNFKKSRAFKKMKLNKFQLALEQLKWQIETSNYKLCFGTKDLLKNNKTEFVLQRDSRISYIGSKDETGRNSMFQLNYNNQNNQFDIKIRKDFGLDKEEKYVFGKCYFNHHKNKLIEALSNEKSTPLTYSIIRRNGRYYLHCTFEYKIEDENDFLTRKTHGTIGIDFNKGFLEVSEIDRCGNLVGADILKYRFGKGNKTQSDLENCISKVLKRALETGKDVCFEDLNFNNKKSKTMKGTTDRSKKYNSMLHSLAYSLYIKLITNITFRNKVGIIKVNPAWTSWIAKNKFCEQMKLNIHTGASFVIARRGFGIKDTVK

SEQ ID NO: 1721 - protein, 442 aa, synthetic construct
  REGION 1..442: note = Synthetic
ILKYAMETRLYIKDNKDIVDYFNETVKEYSYIFRKVYYIIINNPKLKINMLNTELQNEYSISRRTANSIIKTVQGIISSIKELKKTEIKQKQYKLEKISKKLEKLIPVLMELKLKAEKNNIKDLIKYRNLKTKIAFLKIRKDKLINKINSLNYQIETNKFKITFGTKKLFRKNLEEFLNKRDNQMVFIGSKEETACNQTFQLKYITKLNQFIIKMRKDFKYKNEKGEERYAYGKCFFNNHKKLLKEILRSKSSPLTYRIIKRNNKYYLQCIFEIDNKNTILTRKNHGVIGVDFNKGFVTVSQTNKYGHLVKTDKMTYRFGSGNKTENDILLIINKLTELAVNTGKDIVVEDLNFLKTKSGVMKGKSEKGKKYNKMLHSLAYRMFLNRTEQICNRKNVGLIKVNPAWTSWIAKNKFCDKMKLNIHTGASFVIARRGMNIKDVI

SEQ ID NO: 1722 - protein, 449 aa, synthetic construct
  REGION 1..449: note = Synthetic
VHCYETELKPKHNSDIIEYFEQYRRKFNEAVRFTWQYYNNQDPLIAQKSKLNTLIQNKFNISTRGANSIISYVFGEHRALLELKKTELRSFQSEISELKKDIAELSIKVNNLSRKAASNQLNDKQLKKYRNAKIKLVAMKKRLDRRNNALPKIEKQIETKKLSLCFGSKALFAHQRLERDHLSWYIKFIEARDNSIYYIGRREETACNSQCQLIYDRKHNSFKIQLRKEYACQANDRDKYVYGECYFRYGNKEIQETLSLKNSPISYRIFKRDDRYFLQATITADKAGVQQESKVIGVDFNKGFVALSEVKEDGNLINTDKIYYRFRKGDSSKNDLRVLADTLAKRCVNNNASLAIEDLNFAKKKTKAMKHKKDKKYNEMLHSLAYSNFSEFIERACFKNNIHLSLVNPAYTSIIGKEKYSENKKLNVHTAASYVIGRRALNFVDNRPV

SEQ ID NO: 1723 - protein, 447 aa, synthetic construct
  REGION 1..447: note = Synthetic
YKKVLTFSTTLETKHNENVINNFEDTVPKYSTMKRHALHVIRNNPEIKENVLNRYLQDKYGVTTRTANSCIKEVKGIVNSAIVSLSSKIEKIENRIKEKRKNLEAKRKQLAKIHNGRKTNTKKLRKLKFQIYNICNSINRLEQKKEVFQERIDRKKPNICLGTKKLLKQNRNKFIKQRDSQISYIGRKEEKSGNQMFQFSYNKKNNYYTFKIRKDFGKWKSDRSSERYVEGRCHFKYMSKELRKVLVDKSSPVTVSIIRKNNRYYLHVSITLQYTTETIYTRKEYGTVGIDFNKGMLAIAETDQAGNLKNVFQRKFAFGRGGKTKAQLSAILSDVCSYAIEKGKDIVIEDLKSFKKRKSKTNKAKTEQGKEYNDMLHKLPYSTYSQLIEDMCFKRKISLVKINPYNTSKIAKQKFCKRMSLSIHSGAAYVIARRGMEIKDVYVKKVS

SEQ ID NO: 1724 - protein, 286 aa, synthetic construct
  REGION 1..286: note = Synthetic
MGTKKFARNDIKAFKQHRDSQINYIGRTCEKQGNTNFQFQYVKKGNFFSMKVRRDFGKWKDDRSFERFAYGKCHFKYGSKQLRDAMRNNSSPVTVSVIRRNGRYYLFVTVAVSYENSAIVTRKEHGVIGIDFNKGFVNICETDEKGNIVSVEKMRYPFGKAGITNAGLADVVSKISDKAVKTGKSIVAEDLSFERKKRKSKKAVTPTEKERMRMLHSLPYSRYAKILENITFNRKIELIKVNPAYTSRTAEHKFCDQMKLNIHNGAAFVIARKGMGIKDKFLKKAG

SEQ ID NO: 1725 - protein, 422 aa, synthetic construct
  REGION 1..422: note = Synthetic
ITLVTESKLYLKDNTPLYDYFDEYSKLFSFLVRRCVHHLRHQLNDESESRYRTNLMLEFNITNRMAKAVVKTAKNQLKLLKEAARYRYNNLYKRKRSLYKKIQKLKSLLSSSSTSLKQRKLAKLRLFWIQMKLNKVNQLISNGLRLQLTFGTKHLLKNNKTKFLAKRDNQVVYIGDKNETCGNQQFQISFNSKYNRFDYKLRLEKQWASGSDKYIYGSFVLKNKEAKTHILKTLSKKKSNPLTYRIIKRDNVLYLQIMYRRETSDVTRNHYGVLGVDFNKGFISVSEISSEGELQSLTRYTYLHQGKATKTKASMLKLVSKLVSQAVNVGKDIVIEDLVSLDSNKKQEKTTSKYYNRMINNLKFGLFKRCLLSKAPKEGVSVQFVNPYNTSKIAKTSYTDRMKLNVHDAASYVIARRFYQYD

SEQ ID NO: 1726 - protein, 202 aa, synthetic construct
  REGION 1..202: note = Synthetic
LKNKEAKVHILKTLSEKKSNPLTYRIIKREGNLYLQIMYRRETTAVTRYNHGVLGIDFNKGFISVSEINSDGKLQSLTRYNYLHQGKATKTKTSMLDLVSQLITQAISVGKDIVIEDLVTLDSNKKQEKTTSKNYNRMINSLKFGLFKRCLLSKATKEGVSVHSVNPYNTSRIAKESYTDRMKLNVHDAASYVIARRFYQYD

SEQ ID NO: 1727 - protein, 365 aa, synthetic construct
  REGION 1..365: note = Synthetic
MLEFGITNRMAKAIIRTAKNQLKFSKELSYYQYSHLYKRRQSLQRKIDKLKLSLNSKRLKRRKLAKVRLFWAQMKLNKINQLISNGFKINLTFGTKHLLKTNKNKFLAKRDNQIVYIGSKCETCGNQQFQIYFNSKYNRFDYKLRVDNRWISKSDKYIFGSFALKNKEAKTNILQTLSKKGSNPLTYRILKRNGTLYLQIMYRREVLNITQNTNGVLGVDFNKGFISVSEINQNGKLQSLTRYNYLHKGKATKTKTSMLELVSKLVAQAIDVEKDIVIEDLVSLDSSKKQDKTTSKGYNRMLNSLKFGLFKRCLLSKATKEGVSIHIVNPYNTSKIAKENYTNRMKLNVHDAASYVIARRFYQYD

SEQ ID NO: 1728 - protein, 419 aa, synthetic construct
  REGION 1..419: note = Synthetic
TTTFVTRTVLIKNTNNALYTYFDEFVHLYQFLFRKVYHNYRHNLNGQKESEYRSELMEQFNITNRMAKAIMLDVKTSINSHKALFDYKINRCKIKIAKLSAKITKLKRKLQAKRYGRFRTKNNLQKHLFKCQVKLNKLKQFLACNKQSVTFGTKKLLKSSINKFLSKRDSQISYYGDKTECRQNQQFQIIYNSKRNRFDYKLRLDNAYITDNKYIYGSFYLKDKLAKREIQNIQKLKDRPLSYKIIKRDDKLYLHIMFRYNKTVTVTDSNGVLGIDFNKGFITMSNIDKNGRLLKLYKIPYIHKAESGVCNNSLNSLVNDVVKISLDTGKVIVIEDLKSLNNKKIVNDNKRYNSMINLLKFSKFKQKLINKTCKTGSNIKFINPAYTSRIALNKYCYTMKLNVHSGASYVIARRYYGLD

SEQ ID NO: 1729 - protein, 455 aa, synthetic construct
  REGION 1..455: note = Synthetic
KGIDLSTINADDTPILRKRQKKRLVEEKKEEPSSTTSPIDTLQNIKTNNEEIELGKAGEIVEPDEDVIIEMFEEPITKNTSEEPEPEGEVTGENLPEFDPEYILVDDIEDAPDEEIPKEKPKKGFFKQLKEEYKKTSKGTKIFGVISILFSLIFLAVGLFFYHKTTKVKEEQPQQPQPQVEQKQEQPKEEDNTSEKDKLQNKLEESVKSVNTPTKVTTEELFGGYILGSTTYYPDDPQKLYIDFTIKAPKEKQPQADDETALKILKTLKSPKSNPLSFRIIKRNEILQLQIMYRITSESKTRNSNGVIGVDFNKGFVAISEIDQNGKLLNLDRIDYIHKGKSGVTKNSIHHLVKNLVDIAIKSGKDIVIEDLKSLNKNKIEKTERKHYNRMINTLKFGKFRKFLETRCDKLGVGLSLVKPNNTSKIANNKYCYDMKLNIHSGASYVIARRFYNLD

SEQ ID NO: 1730 - protein, 443 aa, synthetic construct
  REGION 1..443: note = Synthetic
TYQFRIDKFVSTEQMNKIKDLMSATSNFYRYCVDAFTFEDKAKKKHKVDNTKELFLALKKKEFCTKYKINTQYANSISREAKNKVELFNAQKEDALKRLEFSIYILSKENEELDKKFLLNKENLSYVEKKELLRKIYFNNRKIEELNKQHNKTSNSTMTCGEKKLQRTDIEQWKQIRNDGNFIVSLYDSFNPYGSHHFKFQHIEQNKFNLNLEVCLGEKINIPIQIKLDNKSRQDKICDILKNPIKYKVSYRLINKENKLFVQVSIVISEQSSEQANSKLIDKTNIAGIDFNNGHLDFCIIKEKENLLFETIDFLYKDATSNQRKESLLLAIKQMFKILKQNNISVLKMENLNFTKLKLKHNKNSNNVKAMNRMIHSLPYSRYEKLMIIEAYKNNIQLVLVNPAYTSKRAKDNLLSDYKNLNLSDLSIHQMAAYSIAIRNELC

SEQ ID NO: 1731 - protein, 406 aa, synthetic construct
  REGION 1..406: note = Synthetic
TLQTRIDQFVDVEQRLQIDVLMKNIGKFYRYCVNNFFHANGKDVLDLKKTEFCKQFGIHSQYANSIAREAKKQVKLFLEARKQKVSELKYKIYRLEKKTYDLNGKSYKERKKIRTQYFLDKREISVLLHQIDKIKKSGMTCGGRGLQRKDVIAFQQKRNNFVFSSHDGYASYGSHHFKFKHVRHNQFVLELEVSDGVKINIDINMDLAVRKKEKWRTMLVNALAAGNSSFRLVKHVTQKKTKLFLQVMTPMPKLEHKKHGKKAGVDFNNGHLDFCITKNNKPIHFQTVNFLHKDANSNQRKNSLLSAIKTFIQQALNMGVVEIKMENLNFGKLKSEKSQIRAMNRMIHSLPYGKYEKMMEMECAKAKILLTKVNPAYTSQDVKKLSQELQEKYTNHQLAAFNIALK

SEQ ID NO: 1732 - protein, 460 aa, synthetic construct
  REGION 1..460: note = Synthetic
TYQTRIYPTEEHANKLIEAMTIVGKFYHFCFNNFWFDKELSYAELKSKSFCSQYQLGTKQANSLAREAKAKVELYRGMCNYTENTLTSKWRTLNKETEKFIRLADKIELLKGKFPKQRKPKSEANPFKWTYEYYLTCDKAGRKQFYRQLKSSIWHNKRRLAKLQKKLKKLQNPSITFGSKDNQRKLTKGKISVETWREIRHNFIFGIGESDISFGNNVIKVLNQEQIQVEILNLEKLILNCRLRNKHYQKVLGECEATGTKRAARLLRRGNKFYLQSILDYSQEESQIKQDVDAIAPSERHYCGIDLNDGFFSVYSPSVWQNYHYDAQFKDYNSNQREQNLRQLIKQMFKDIKQDNIHVVRIEDLNFMKKKHQNLGKGMNKMLHELPYGQFRQIIESECFRHHMVVEYINPAYSSQKALKLGLDRHLGAAKIIAEGNIGVFEFKKSLKNEQKNEEKQLTT

SEQ ID NO: 1733 - protein, 363 aa, synthetic construct
  REGION 1..363: note = Synthetic
TYVDRFYPNETQQTQLDGLFRSCFRFFATVFNEKFFGRAKPDLDYKKITHCSQFNIGTKYANSLIKLASDRVKLHKAEIKDKTKQTEKRLKRIAKERENTTDKSKLWELNREEERLNAYLRKNKSVTFGSKKLQAKDINLWKQKRNNFAYGIGEHDVIYGNNTIKLKENELQIQVCNRNVIKIPLNKRHQNKNTRFNQVLGNDDKKTILLIKRNNKYYIHVSFEAPKAIRFNKKMGLDFNYGFISYFVLKNHRSGNIRYEIGKVANKNKESMTEVVKRIINFALANRVGVINIENLNFTKKKQDDKSYMLHKLPYARYIKTMKKECYKVGIRLRLVNPAYTSQNAMKMGLDRHIGAAMLIAQK

SEQ ID NO: 1734 - protein, 554 aa, synthetic construct
  REGION 1..554: note = Synthetic
TSRIKITKEIKEYDVDTSAQIDAMMAEQMNLFHTVFNKAWFAFMAEEEFSNKEIHQFDNSTYLEKHGYSFNTKYAYSIARDAADKAKMAYESYKYQLDDIDKRIKQFSKNIKKDEKKLNKLLKKYKIDDINLNDSLKKNKINDKDAATIKKLRSNLYWNNRKIEKEQKKRKQIASYTFGSKRLQRKLSKDNISTEHWRNIRNNRILSCAKASVSYGNDNIKLINENTLLIKLTKEKQIKLDVDLTKLHLSKEIFSMEQLKLFCQIIRRHEKHGRKGNQATKSNTEQNAQQRQEQRKSKIYRTKPDYYLYVSVDYKNDNKQNSVDVTVQNSLTAGIDFNSGFITIACNKNKSGIQNEKLVSKKNGLFKKTDLVEYFAKMKLNQDLEHERSLNIDNATSVPLAELIPLPQNYICDLLNDEATETAKFDFFVHNETKMNSQQLSDSMRKTIKSALNYVKEIGCSQVNIEQLNFDDKKRDISCSSQYNLTQDYNHMLHSLPYSLFKKIMEVECYKSDITLKQVNPAYTSRNTYINSIAKNKDELKIRHFGAALIISML

SEQ ID NO: 1735 - protein, 375 aa, synthetic construct
  REGION 1..375: note = Synthetic
LQRKLSKDNISTEHWRNIRNNRILSGARASISYGNDNIKLINENTLLIKLTKEKQIKLDVDLTKLHLSKEIFSMEQPKLFCQIIRRHEKHGRKCNQSVKSNTKQNAQQQKKQRKSKIYRTKPDYYLHVSVDYKNDNKQNGVDSTVQNSSTAGIDFNSGFITIACNKDKSGIANEKLVSKKSGLFKKTDLVEYFAKMKLNQDLEHERSLNIDNAASVPLPEPIPLPQNYIYDLLNDEATETAKFDFFVHNETKMNSQQLSDSMRKTIKSALNYVKEIGCSQVNIEQLNFDDKKRDISCSSQYDLTQDYNHMLHSLPYSLFKKIMEVECYKLDITLKQVNPAYTSRNTYVNSIAKNKDEPKVTEFRHFGAALIISML

SEQ ID NO: 1736 - protein, 493 aa, synthetic construct
  REGION 1..493: note = Synthetic
TYRTPLTHSLSDENKQQLLGFMQEQGRYFRTVFNQLYFQILSSKDKHALLKIYCSSQFLQQNRYLFGTKYANSLFLEAYNKVVLHQEAYCFRIQQIQDRIKVLTLKKEKLVDKLTKTLKSIEKLDKKDTCFKTLRFNLLKEAKAIKTSIYWVNRKLEKQESRLNSSSLKSVTFGGKDAQRKLSRKQIAGAKWKSLRNKSIYAIGKSDRKCGNDSIQFDVENKTLKIELERGENYKNYLFLENIENQYASPFFKENNLLAEVHKKTQRIILTKFSPNIAKCKFELHTTVEKEENRVIKEIQAKIRAFPDNLNEPNLDEAKKAIKDYAKALYQEKKQAACLGVDFNYQHLDISSNLPNELKQEDLPENSVLYRFEQTIHYDINAHNRYQNKENLRQAIKVVVSLAKQHNLNIKIEDLNFNKKKAKLFPAYSDYGKGYNRMLSSLPYATYEKMMELECDKAGVYLIKVNPQNTSKKAIEQGWERHIGAARNIAQQI

SEQ ID NO: 1737 - protein, 440 aa, synthetic construct
  REGION 1..440: note = Synthetic
SLTLTYSTRLRIDNVEDRRYLDNRFEYYAHIEHELFNGLAHGKLESKGLRDRTAHKYGISGRQANSLVHKTLGRLASLKALKKLEKSALTQRIWSIEAKIQSLSDKISVLKQDASENIITDKQLHKLRALKAKKHRLSLKLNQLRQRLAEFDKRANSLCFGTKRLFKAQFHLEDSGFASHGDWLREWRKARANSWYFLGASAEHLGNQNCQYDINKESLFVRMDTVKLKHIVINGVKFPHGADEIRAAQQNGQPVTCKIQKTERKYYLRASVALPKPMAVTYEAHGSIGLDYNKGFIQACDVSGDGNITGFMKYHLPDSGKNKAMGETALRTAVKAIAEKAAQTGRPVIIENLDFTKKKALSNKHVSKRKKYNSMINSFDYSRYIEYLESACYKAGVRLSKVNPYKTSKTGSERYAKRKGINTHQAASYAIGRLGLGFHI

SEQ ID NO: 1738 - protein, 487 aa, synthetic construct
  REGION 1..487: note = Synthetic
KKKLQPPFQKAVLCKPENVPLCSSGRIDLAIPENRIIYDFLKGYSGTYNSLLHWTFRQVMNQTFRTEGELKKTIMKKGGLKARAANAILREAKTEYHSAIEIKNSQIEDHNQKIRELTEEIKDLEIKKEELNSEVENWSRPPKKAVKKLHRIKAKLWSRKNRLHRYRQTLRRLEKEVQTGKFSYCFGSRKLARQQWTLEYPNSPFSTHRQWLKAWRDHRSRHTYFLGSSDETCGCQLIQGTWTGSGDLFEFRVRSPFAGDQSTIAFTVRIPWQSDLIDWHQKNSSISYVFVFRKNGSLYIHPQIEEEARDAAETKGCLGMDINAGFLAVAEIDELGNYIQSEDIYYDDFSLDADTAMKQILAGIYKRAKEKSLSIAIEDVSFKKKKAKNHGKRMNHILHDFPYRKYREYNERKASRSGVPLHIVSAAYTSRIGKEKYMEKLGISGHQAAAYVIGRRALGFREVFVSEKKKINRNHIPDYQTAVITAV

SEQ ID NO: 1739 - protein, 486 aa, synthetic construct
  REGION 1..486: note = Synthetic
KCRIAECTEKYYFVNSAVNAAKGSIQSVKELKSLHQDEVSAQIKDLKQKIKETDKELKRINKIKKMLIRASKSRQPKYKLDGIHESYHPNDGTFRVLSTNYKGETHTVHVYDNPYLFELKYVSPMMKMLKARSGSLNERLERLNQKYEGLKDQKIRICYGSRKLFHQQDGMVRECHRVHKYQNHSVWRQAWHNARVNSLMISGRKDAKQGNFVFRYDTETHELSYQSQSGAAVIIPNVEFPYGQKEVENAVNQTRDEQRAVTWRITETGGSFLIQCIVTIASDVNIMDDYTNGCIGMDSNCDNLSISECDGSGNILRHKVIHFDLENKSSGEAEQVLSSALDEVFHWCNSAGKPLAMENLDVKHPANRYSGKRRNAVTSKFAFSKITQLAESKAYRHGLGVRKVNPAYTSQQGKILFVKKYGLSIHEAASAVIARRAMGIKEKLPRSLYNQLSDKQKQENRFYQWKSMYNITKKLRVSQMYEYDFA

SEQ ID NO: 1740 - protein, 548 aa, synthetic construct
  REGION 1..548: note = Synthetic
VRTLFSRHISKGSLDPEELNALLCDIALFNQIKHTATAMQEIQNTSAREATGVPDRRKKENRTKEHPVSAHVQLKQKYHADDHFVNSAITEAKGALQSAKELKKQNISEWQEQLKDNKNKIRSTKQQLTRMQNLRKKLKSWSKKKDPAYELSGVKERYDKETECFEVMNLRTYKAMQSYENAYLFEVQYIIPRIHELKNRLAHLEQRKELLKDRIARENEPASVCYGGKKLFRQQNNGKYPNHATWKRAWQKKRSHALMITGRKDASQGNFRFSYSTETRGLIYRSQQMKNGEPVLVHLKNVVFPYKQEFVNQAVGLPAHERHAVSWRIIETSGSFLIQCIVTVPEKRMVEFIGDGCIGMDANYDNLSISETDGSGNILRHKVIRFDLEGASSGHAEQIISSALDEAYCWCRKSAKPLVMECLKLKHTANRYGSKKKNFVTSRFAYSTVTALAESKSYKYGIALKKVHPAYTSQVGKLIFMKRYGMSVHEGASAAIARRGMGIQEKVPLLIKVIDPSINWNQPRRQQWSAAYKITKQLRASEMYALAI

SEQ ID NO: 1741 - protein, 560 aa, synthetic construct
  REGION 1..560: note = Synthetic
TRTYFSVHIRKDLMSPSSVQDVEDDIVLFNRVRHAATADLEIRRASSRKGSGGSVPDMRKKENRAFLVNAAPSPHLRLKARFHTDDHFTNSAVNTAKAAIQSAKELNALNIEETQARLSDLRSARAGRRRNLTRLRNIKQMLIRASRAVKEGKAPSYSLAGIFERYDASTGEFLILRRGKIKQSYSDPYLFEIRYVDPEIRRLEHTIRLLDEKEERLRIKAARMKETPPGICYGTKNFFRRQYDHDRYPDHDIWKQSFRKRRCRALMVSGRKDAVQGNFLFRYDPENRTLTYTSQQGRHKVIFPGVVFPYGQEKVEAAVLAPKADRHATAWRIIDTGGSFLIQCIVSEDEAPRLNDFFLDGCVCMDTNYDNLSIAQLDGCGNPLWHKVIPFDLEGCSSERAGHILSNVLEKVFGACRLANMPLAMEDLKLKHTADHYGSKKRNRVTSRFAFSKITDLVDSKSFKYGISVTKVDPAYTSQMGKVLYVKKYGLSVHEGAAVVIGRRAMGLCDRLPEPFRMGLSAAQASDKRLRQWKAAYREIKQLLPKDMYAFDFRAHTDTG

SEQ ID NO: 1742 - protein, 560 aa, synthetic construct
  REGION 1..560: note = Synthetic
MKKTLLSRHILFASLSQKEVDTIRNDIALFNQIKRTVTRRKSVSCASEKEAEKTADKPDLRRKENAELRKKQPKSVHLQLKEAFGTEDHFTNSALRSANAAIRSVKELKQMNLDRAESDVDDITAKIKDKKKRLKALNNMQASLVKRSKAKKAGRRIPAPCSNPIEVYRDGKWYITYFGKTVSVYENDYLFEIRYLRPKIRQLSGAIKALVLCKNRLEHKISLMKEDKDAHICYGRKDFFRKQSTVYENQHDVWLSGFRKRRNKALTISGRQDADGGNFLFHYDPLSHTLSYRSQTGKRTIAIPNVVFPYGQPDVDHAVTVKKPERNAVTWSIEIHGQSFIVKCMIEAVSNKRINDDYSNGCVGVDSNYDCLAVTETDGSGNLLRHLVIPIDVTGKSGSNEQSVSKALDQVFAICRESHKPFAMESLSMKSKPHLYGGKKQNRHISLFSADTITWLAEGKALRNGVACAFVNPAYTSQIGKMKYMRRFGLTIHEAASFVIARRAMGIRTERLPAWMRRDPVVQKKRTAKNAGRNAWRDAYTLTKKITPAERMQGPRPSFA

SEQ ID NO: 1743 - protein, 568 aa, synthetic construct
  REGION 1..568: note = Synthetic
MQKTLFSRHIPKDKMRSEDAKNVSADLVLFNRMKQASVRLQLRGSKPEIPEGVDLRKKANKELKEKLAPSFHMQLKNRFGTNTYFINSATQEAAASIKSVKELRSDYISEQEEKLDQVKDKLKQTAKQREELEKVKAKLIERSKARKVQKKTLPKPRLLKGGQITFDKESGVYTIWHTNLRTMKRTVISTYKDDYCFETQYVVPTLKKLNATISGLEGRIAHIEAKIRHLKEDVPSICFGSKDFFRKQNTVYADKHDVWQHAFRKRRCRGMTISGRKDSKDGNFVFWYNIATHDLHYRAMNGSDIVFPNVVFPYGQKLLETYIRNQTDEQLSPIAWRIEETGGSFLIKCIITLSDVDMNTDCSDGCIAFDTNVDHLAVAELDRYGNLLDKTTIPFKLDGLTSEQAEHVLSHVLDQVFQKCVATHKPLAAEDLKDVATSELYGSAKRNRILSGFAHTKIRELTDSKSYKYHVAVKYVNPAFTSQIGKIRYMRLYGLSVHTAAAFVIGRRAMGFKEPVPAAYRISIPAEKLNKHHWGHWGSIYRITKNIKPHEMFAPVQNGASSISQAGA

SEQ ID NO: 1744 - protein, 607 aa, synthetic construct
  REGION 1..607: note = Synthetic
RTILKEGEHMEKCLFSKYIKPDAMGSIKADIVRYNKIKRYAFSLIVKMGGDKPLSDGTSIHNHLKDKFDVNDHFANAAKREAVASYKSAMECLKLNAETLESKIKQENKKLSSEQKRLAHLKEEKASLVNRSLQRKSGSKRKVKFKSYRGGNESETSEGTFRVKKGKKITTYKNQYLFEVQYLTPEIKRVEHRIHYIEQRRTRHEHELERIKSQIDSGRPSVCFGSRKLFKQQNTIYAGRHDEWLKEYRSRRNNGMTIPGRKGIIQGNCVVRYDTDTKVLSYDSMTRIPVKTKNSKTKKESVLRAVTYEIKGVEFPYGQVFVNDAMNNKSRQAVAWRFEDAGSRILVKCMVSVEQELSRKNEYYTDGCVSFDTNVDHLAMTELDKNGNLIHHEVIRFDITGKTNEQRGQILSNSLEQIFKYAKQKCKPVAMENLKDIKNESMYKNEELNRKLSEFAYTKITQLAESKSYKYGIGLYKAVPAFTSQIGKIKYMRHYGISIHVAAAMAIGRRAMGFKERPPKGLRTLIPQGNKNRHHWSQWRFLARHLKKQPAYKFYHMIPYDEFECITDMNQYMKEEFCNYQNRAYFLKRLTDIFNQLARTMPGVTTV

SEQ ID NO: 1745 - protein, 200 aa, synthetic construct
  REGION 1..200: note = Synthetic
VFPYGQDLVNEAVGSTDRNAVAWRFEDAGNRILVKCMVSIDQGPSRKNEYYADGCIAFDTNVDHLAVAETDRHGNLIYHKVIPFDLTGKTNEQREQILSLALEKVYKRARERYKPVAMENLKDIKNESMYGNKEVNRKLSEFAYTQITRLAESKSYKYGIGLCRVTPAFTSQIGKIKYMRHYGISIYRSSTGHWPEGHGI

SEQ ID NO: 1746 - protein, 370 aa, synthetic construct
  REGION 1..370: note = Synthetic
NKKLKARLRMINQRLESSRCKLQKVEARIDDHLPSVCFGSKQLFKKQNTVYKNQHEDWKRAMYKGRNPGMTISGRKDATQGNFLFKYDVKTKDLTYRTTKGEILVLKNVTFPYGQELVEQAVLAAANERNAVAWRLEVHGSRVLVKCMVEITNSQKNYDFSEGCVAFDTNVDHLAYAELDGHGNLLHHHTIPFTLRGLSTEQREQVLSKALEEIFQYAQKAAKPIVMERLEDIKQKPMYQHKKLNEILSSFAYTKVTMLAESKSSKYSIGLVKVNPAFTSQIGKFKYMRHYGISVHEAAAFVIGRRGLGYQDKLPKPMRHLIPDGKKNRHHWSHWSYLMAQLKTYAPGVFYKPIDYAVIPTIKELKQQLN

SEQ ID NO: 1747 - protein, 543 aa, synthetic construct
  REGION 1..543: note = Synthetic
IRKAYKSIFIKKNFMPAADNALLSQDIETYNRMMHTAFVWNNQDRVFPDDHSIHLHLKDQYHCNDYFANSANQEAKGKLRSLKELRSSYISDMKDDIRAITKKITGKQKYLGSLQATLDSIIIYTKGNYSNPAKIKSCPGVTFRPDGSVKWRCFHKTKIFDNIYLFEHQWLRPQIRKTATNISFMQHKIDRLKIKIISLQNDPRYHICFGTKKLYHDTRVCGQDRKNAIRKARYHRMQISGRSDSKNGNWVFSYDPVLQKLKYRSLNDWAHTIVFPGVRFPYGQDKISVFLAERRGAVAWEICDMGNAWQVTCIIEDTPEHIKNDYFGTGCVAFDMNYDNIAMAELDASGNLLHHKILRFDLENKTSGQVEQLLSRALEDVFRYAANKRKPVVMENIRFLQRKKFYDWNTKRTRRISMFACNQMALLAASKSNKYCIEVVQVNPAYTSKTGLLKYKKRYGLSTHEAAAFVIGRRGMGFTDKVPDSWKRHLKPEHRTKPRYEQWKTLYAVLTKMNYRDLNQLLYPGLQPALNFMQPINYSHSDY

SEQ ID NO: 1748 - protein, 359 aa, synthetic construct
  REGION 1..359: note = Synthetic
MQHKIDCLQRKIASLHDDLRYHICFGTKKLYHDTRICGQDRKNAVRKVRYHRIQISGRSDSKNGNWVFSYDPVLQKLKYRSLNDWAHTIVFPGVRFPYGQDKISVFLAERRGAVAWEICDMGNAWQVTCIIEDTPEHIKNDHFGTGCVAFDMNYDNIAMAELDASGNLLHHKILRFDLENKTSGQVEQLLSRALEDVFRYAANKRKPVVMENIRFLQRKKFYDWNTKRTRRISMFACNQMALLAASKSNKYCIEVVQVNPAYTSKTGLLKYKKRYGLSTHEAAAFVIGRRGMGFTDKVPDSWKRHLKPEHRTKPRYEQWKTLYAVLTKMNYRDLNQLLYPELQPALNFMQPINYSHSDY

SEQ ID NO: 1749 - protein, 527 aa, synthetic construct
  REGION 1..527: note = Synthetic
MKKCLASRYIKKADLQSEENERILQDLFAFNSMKRTSFLWQRQRRKFLKEDGKELSHQLKLKEVFACNDYFANSARMTAAGMIKSGQELAKLYIEDAKEDIKAIRKVLRKKKKYRKKLLKIKTSIIKYSKDPKNSLKGSANIRYEKDGSVTVQFFQKVWTYETLYLFEHQWLDRKLRQLKTQIAKMKHKLKRLEIRQQRLKAHPLKVRFGGKKLTKNRTISERHRALEKRRNRRMMVSGRKDCKYGNWVFRYDTETKTLEYRSMTDWDGNRICFPNVTFPYGQTWIESWLKERKGAIAWEIVDCGNAWQIRCILTEEEENMNNYYGDGTIGIDINYDHIAMTETDQSGNLLHHEIFRYDMEGKRSGQIKHQISESLEKIFQYADQQHKPVTAENIKSIQRKKFYDKHRKRHRHISMFASACIRELLISKAVKHHIGVKFVHPAYTSKVGKMRYLRRYGLTVHEAAALCIARRGQGYKESIPSYLKPYLTNKKVRALIPQQWGSLTKLINKVTTQDLLTYQDPVLHRN

SEQ ID NO: 1750 - protein, 342 aa, synthetic construct
  REGION 1..342: note = Synthetic
MEHKLKRLEIRQQRLKDHPLKVRFGGKKLTKNRMIPERHRALEKRRNKRMMISGRKDCQYGNFVFHYDIETKTLEYRSMTDWDGARICFPNVTFPYGQEWIETWLQERKGAIAWEIVDCGNAWQIRCILTKEAEDMNGYYGDGAIGIDINYDHIAMTETDQSGNLLYHKVFHYDMKGKTSGQIKHQISEVIEKVFQYADQQHKPITAENIKSIQRKKFYDKHRKKHRHISMFASACILELLISKAVKHHIGVKFVHPAYTSKAGKMRYLRRYGLTVHEAAALCIARRGQGYKESIPSYLKPYLTNKKVRALIPQKWGSLTKLINKVTTQDLLTYQDPVLHRN

SEQ ID NO: 1751 - protein, 285 aa, synthetic construct
  REGION 1..285: note = Synthetic
VVIDGVHFPHGQQLVEAAVAAHDIAIRNKKLPLDQQVEGWKPGPVTWSIRDCGNAFLVKCMISVPADPHLNSCFDEGCVAFDMNYDHLAVAELDGKGCLLNHRVVRFRMAGRTSDQVNNAISEALEQVFRQAAVANKPIAMEDLDNPDKCLLYGNKKANRKISEFAHGRMTYLAGRKSQKYHLVVRAVNPAYTSQIGKLKYMRQMGLSVHEAAAYVIGRRAMGFQEDVPAELMHLIRKPAIPVFHLSNWAALYKATKKIPTHCFYRKLNYQEYKTAAALRKALVK

SEQ ID NO: 1752 - protein, 428 aa, synthetic construct
  REGION 1..428: note = Synthetic
MMLVGRRDSIGGNFIARYDTNSHTLRYRSIQGRQIDIPNVRFPYGQGWVDAAVNAHDIAMQNKKLPPDQQIEGWKPGPVTWAIKDCGDAIQVKCMISLPADPHINSCYSNGCVAFDMNYDHFAVSETGSKGELLEHYVVPFQMEGRTSDQITNAISESLEKIFRHAASVNKPVAMEDIEHPDKCLLYGNKRANRKISEFAHSKVTYLAERKGQKYHLNVKKVNPAYTSQIGKLKYMRLLGLSVHESAAYVIGRRAMGLKDKVPKDMFHLVPEKVVRLHHWAHWAALYTALKKIPVSKFYRKINYHEYETPAALKKGADSNPNPPQKKELHRNPALVTSGLAPGIGRKAVARRMTALGTDESNTPAFPAAASLKRTRTRPRVRANRCGRFNRKKVNPPPNLLYWLYAPPQGEVYSIPEAPGFSRGEIHL

SEQ ID NO: 1753 - protein, 574 aa, synthetic construct
  REGION 1..574: note = Synthetic
SVKTYCSTYIKKKSMASSMAAKLETDIFTYNTMLRSMVRDLGLPHSKDEPTIHVQYKNYGLSDYMVTSMERTASGIRDSAKECLALDIETKEGRIKQANQKIEQLEYQILNMQKIKDSLITRNKARKAGTPIPKFVNYFGSTIYPEPAKDGGLSFTVDFYRGKNRKRKRSPLFFANEYLFEILYVDPYIKKRKRRINQIKGRIHNLETKLSKLKRDMGSKAYHICFGGKKLMRQRSTVVDVNAWHDAFTRRRTREMLLVGRHDATQGNFMVKYDCTTRTLSYTAISGTVITLPNVHFPYGQEDVDAAVSASRITKQNKKLPKDKQIPCWEPGPVTWAIKDCGNTFQVKCMISVQSTQTINSCFDDGCVSIDMNYDHLAVAELNQYGQLMNHFVIPFRMDGRTSNQIDNAISEALEVVFQHAVNVKKPIAMERIKNLKKELVYGNGTRNRKISQFAYGKIEMLAESKAQKYALAVRSINPAYTSQIGKLKYMGAMGLSIHESAAYVIGRRAMGFKDRVPNCFKHLMPPKKRDSHCWAQWASVSTPLKSIPICKFYEKIDYGKYKTMTALKEALTA

SEQ ID NO: 1754 - protein, 541 aa, synthetic construct
  REGION 1..541: note = Synthetic
RYYCSTYVKKRDVSDEVNKRIADDLALFAAIKFENFSILNHASDKNSKVIIAGTPHVYLKDKYKVSDYFVTAVEGNVRMVRNSQKELLEMYIDDINADIKSLAKKEKDLNARLGSLKKMKASLILYTKNGGKKRSDIKNFKSSAISFKPDGTVSVGIGKHMTVYKNIWLFEHVYLDKKIRQIQRALDHVKKKRRRKEHKLLKFREQIETGRYSIYFGSRELMHKDIPKPQKDKMIKKKRQGSMTLSGRSDANNGNFMVSYDTKSHELSYRGSAASGRQDKDFHRKNFLPVGKVEFGYGQALIDRLIDEHQTPVSWTITDCGNAWRFDVCVTIKDDRKNDFYGNGCIAMDINWDRIAVTELDGEGSLLNKKVIPFKMEDLSSEQTGHQISNALEAVFAICCEKKKPLVAEDIGRTKRKQDLYSKTAKKNRRISMFASKKIRTLTESKSFKYSVDVTFINPAYTSQTGKVKYMRRFGMSIHEAAAYVIGRRGLGIIDRLPLIYRQQLKREHASLPRLTQWARAYKFTKAVQAAAMYQVDELPF

SEQ ID NO: 1755 - protein, 237 aa, synthetic construct
  REGION 1..237: note = Synthetic
MYPDVVFLYGQDHVNRAIQTQMNLKDKLKFGKAIAWSLEDRGDYYIIKCLIDVPATPYLNTSTSTGMVGVDLNVNHIAVANINAIGQCVDAFTLPFNLEGKISGQRAKIIEAEVITLVDYAVKHHKPLAIEKLDTTRSKVSRPYGNRKANRQMSQFAYQKMILAIKSRAEKMGVAVYVVNPAYTSQIGKMKYMKRLGVSIHMAAAYVIARRAMGVFDAYTVFCQNLRVLSDRTIRPK

SEQ ID NO: 1756 - protein, 564 aa, synthetic construct
  REGION 1..564: note = Synthetic
AYFSNRVYKNVNTKASVEDTQHTLFVFNQAKQYRVQREVREKRGSKEKGKSSIHQQVKAKFGLTDYYVNSAVQEGKALLSAQQELKKMYISNKEEQMKSVKKKIKSTKSRLTVLNKIKNSFIKEKPNFNKTSPEQQKGNFFVVKFKTKTDLYYNAYDFEHLYIDNQIKHITSRLGRLAFKLDRFEKQTESLENGVKSVCFGSKKLAKARTTTEKYQNNPALWKRDWYLARYGKMTISGRKDAKSGNFVFHYNPDTNQLTFKAINGNVVTFDNVVFPYGQENVENAIHTQLGLKNKKHFGKPIGWSIEDHGEYFVFKCLVDVPPNPYVNYSKLGGIIGVDSNVDHLAISNVNSIGQLIDSFVLKFDIEGKTSGQVSKLIEAEIITLVDYAAKHKKPIAIEKLNTTKSKVKNTYGNKKANRRMSQFAYNKIVMAIKSRADKVGVEIYEVNPAYTSQIGKMKYMKRFGISIHESASYTIARRAMGFKEKLPPALHSLVPEQKQGLHHWAQWRSFSSCLSFVRVHVFYKIELSGQSRLSSWSSLFSQRATSDFERIGLSRLESRKSKA

SEQ ID NO: 1757 - protein, 566 aa, synthetic construct
  REGION 1..566: note = Synthetic
AYFSKRIYKNMLPKIYVDAISNSLLLFNRAKHFAFQTQVVEKRSGKSKRDNSLHLMVKKRFDMNDYYTNSVVQEANALMTSQSELKQMYISTKEEQIKSVKRKIKTTKGRVTTLTKIKRSFIKGKPSFNKTSREQQKGNFFVVQFKKKTDIYYHAYQFEHHYLDIQLKVLKNRLGRLEFRLDRLQKQLKTLRNQIKSVVFGGKKLFEGQHTLHHYRNNHRLWLENWEQSRYSKMTISGRKDAKYGNFVFTYVSETKNLHFITLNGVAIDIPNLVFPYGQENVEKAIQTQVDMPSRLKMKHGNAVAWSVEDHGDYYIFKCIIDFPEEKNINHSKSAGVFGVDLNVDHIAWSNINVKGQLIKSGVLEFDLDGKSSGQATKIIEVEAIRLVDLASKLNKPLVIEKLNTTKSKSSNPYGNKKANKKMSMFAYRKLISAIKNRADKMNVAVFEVNPAYTSQIGKIKYMKRLGISIHQAASYVIARRAMGFQEKLPPVLHSLLLEKIVGLHHWTQWKWISSRLSNVHTHCLYQIELSIPSKHYSMSDLFPSGALSDLVAKGLSKKESRKPIA

SEQ ID NO: 1758 - protein, 554 aa, synthetic construct
  REGION 1..554: note = Synthetic
TYFSQRVYKHTLPPGFVNEVSYVLKVFNRAKHVSFQTLVREKRWSRKLHDESLQTVLKKRFGLTDYYANSARQEATALFSAVTELQTLYLQQTDEKIKDIKKKLKSERSTLTRMRKIKESFVKGNPTFPKNSPFILQGSGIISLSLQKKTIIWLTTYSFEHRCLDRKIKHTKAKIGRLQHRLDRLRQKKDKLKEHIPSAVFGTKQLFKYQFTKEEFAENHEAWKKLFCAARNKRMMISGRKDAWCGNFVFQYNMKKQELSFTSMSGKVLTFPFVMFPYGQDIVNDVVSAQIACKQKKQYGKPITWSIEDHGVYYIVKCMADVEADYSINFSTSDGVIGVDCNYDHLAWANVSKDGNYLESGILAYSLEGKSSGAITKIIEAEAIRLVDLAVQKNKPLVLEKLDTTLSKTGNKYGSKKRNRRKSMFAYRKMMEAIRSRADKMGVEVIEVHPAYTSISGKWKYMRKFGISIHQAAAFTIGRRGLGYKEKVPTVLKTYMAQSNIHHWKQWSTWNKKLCIRTHALYTLFDVNRPHQGMELSSTWLTEEERNVLRRVLA

SEQ ID NO: 1759 - protein, 442 aa, synthetic construct
  REGION 1..442: note = Synthetic
KVKESFRKGKPTFPKNTSFLIQSSGIVSLSLPKKTMIWLTFYSFEHSYLDRKIKNTKAKIGRLKHRFDRLQQKKEKLQKSVPSAVFGTKKLFRSQFTKEEFVTHHEGWKTLFSAARNKQMMISGRKDARCGNFVFQYNIEKQELSFSSIHGNVWTFPFLMFPYGQDIVNHVVDAQIACKQKKKYGQPISWSIEDHGVYYLIKCMVDVEPNPYINFSKSDGVIGVDCNYDHLAWVNVSKDGNYLESGSLSFSLEGKCSGAITKILEAEAIRLVELAVRKNKPIVLEKLDTTLSKTGNKYDSKKRNRRKSMFAYRKMIDAIQNRANKMGVDVKQVNPAYTSISGKMKYMRKFGVSIHQAAAFTIGRRGLGYQEKVPNVFKTYMDLTNMHHWKQWNIWNKQLAVRTHVLYTLIDVNRPHDGINGSHMELTEEERKGMRKLLAYKG

SEQ ID NO: 1760 - protein, 564 aa, synthetic construct
  REGION 1..564: note = Synthetic
KTYFSNRVYKKDNFSPSQVYFISNAMVEFNRAKHKACKLFLTEKNYKVDHDPSVHMQIKKLFGFNDYWTNSAVKEAKAQISSQEELRKIYAAGVENQIKTKKDRVKELNSKIKRLEELLALIIKGKFKTWRGSYIVKRKSGIIGVDSRNKSLVFFNAYDFEHQYLCPEIKRLKNRVKLISFSITRLEKKLKKLQSDFIKGCVFGTKDLFKKQFTVKKYQNDHETWLKEWYSARYSSLIISGRTDAKYGNFVFKYDVKTNILAFDLPNITADPEDNIADDLPNKITISVPVVFKYGQKEVGDALIFQNERRKPIAWSIEDHGDYYIFKITVDIPNNPYVNYCKDNGVVGIDMNFDHAALTEINRHGSLIDWLNINYNLEGKTSDQIIKILEKAAIDIIDFAKEKKKPIIIEDLDTTDSKFKLQYGSKKRNKKISLFAYRILTNAIYARADKEGVAVFKVKPNFTSIMGKLKYMAQKGISIHTAAALVIARRGMRFKEIVPPVLSVFLPEKIRRRHHWSQWNYLQRQVKGVKVHYLYQLSKKFKGSEDTVGLKKVLESSKILPQAG

SEQ ID NO: 1761 - protein, 560 aa, synthetic construct
  REGION 1..560: note = Synthetic
RIETNSSTRIYKDKLSFENLNNLSNILYIGNEAKIKTYSILVYNHEKGLSQSIHLTIKNMFNLNTYYTNYAVCEAKWNKSSNVELNKMYIDDLKQNINHREKSAKDLTNKIKFWSKIHTHIIDISKAIKNSKSLPKFKYYRPYYFYMSDDKIFVEANYKNKTIIYNMYDFEHALVVKKISRLTNKLNMIKRGIGYQKQKLARLNTSAVKSCFGTKKLFKAQHTLYNEHFEWKEDFYKARHKTIELQGLKTVTQGNACVKYNYETNLLKIQLPYENKIGAYHSSQWFEVENVDFPYHKDLLIEALNTKNSPVSLRIEDKGDYFLFKPSYKLFKDESQINCSKANGIVGYDINYDHIAWSETDCIGNLLDFGTIHFNIANKTSGQISKILEKGALGLVQIARDKNKPLAGEDIKNISKSKLTYGNTKRNIKISMFAHKKIIEAISSRAFKENLAVFYVNPAYTSQMGKIKYMKAKGISIHVSAAYCIARRALGYKEKIPLIYRTFTTNWRVLSKELKTLKIHYLYKISSTFGYTDLKAFVKDTIVSNYTVFKEKPIIKFSFN

SEQ ID NO: 1762 - protein, 549 aa, synthetic construct
  REGION 1..549: note = Synthetic
ITIFSNRIYKKALNTSDEIDIEQESYKSNRAKWYLTKLLTREYNEEICLLKDPSLHVFTKKKFGFNDYFANSVINEAKAALSSRVQLHQVETKEFKERIEVKQKKIDELQRELNGKRAMLQSCVKISKASKQGKPKKKDLKLKTYKGCKERQLPSGLYGVTYKKYTRVFYNLYDFEHQYLKPEIKRLKNIISQIKHSINIMQARLERMESRLPGITFGTKRLFRARFTKYWHDCGKWKAEWRKARLKSFKIVGRHDAKYGNFVFKYHPDTKTLDVVLSKDRTIIVKNIYFTYGQELLEAVLNTKTPITWEITDHGEYYIFKAMFTPPTAERNYCTDNGVIGYDKNYDHFAWAETDGKGNFLRHGKIPFNLEGKTTGQVNKILEAAAIGLVKIAREAHMPLVGEKLDTSDSKTRLKYSSKKRNRKISRFAHQKMDRSIESRANKEGVGVIRKDPAYTSVIGKLKYMRAFGIPIHSAAACVIGRRGMGLKEKVPAAYRKTIPEANIKKHHWSHWRFLHRHLKGIQTKGFYRLTLNKQMFLSIKGVKAALKA

SEQ ID NO: 1763 - protein, 587 aa, synthetic construct
  REGION 1..587: note = Synthetic
ITRTINADKRYYIDENLIINSDSLVDTEYRFNDMKIQMYNLLYDKKYKNTGILTENTYSKWCKDTFKTSDYYNCAVYTSASGMLSSQNELNKLYIKTKKSDLDARDTKIASTIEQLEKKQAIKESLVIYAKTKKWKTPYSGCQTKMTGKSVSLPGNKKVEVDIYERNIEADIRKLKSRLKLLISARNHMQDKLDCLKKNPPKRIIFGSKKMYSEKDSEDINIEIWKQEFFNKRHASMSLPGRHTSKNCNFLVRKASAADFATRKELDGHKEALIITCMDGKEAILLDFQLSRDNNLWLDALNAKPDDRKPVCYNFQLKCDEKGRLYFIPSVTMVLENTYCNESFEDGCVSIDLNYDHVALTDIDKDGNRISGKVLRFNPENKTSGQISDEIGRIMSKVGQYCEDRKKPLVMEDIDTTISKHGMKYGNAKGNRHASIFAYRKMESCIENQSYRRSFGVIKINPAYTSQIGKILYMRRLGISIHEAASYVIGLKGMGLRDKLTLEEEMAARLTDSLKKELSDGEDIYSLMKVWKYISSKLSGICTHSFYRSIPYEYKKGDGLTKTGKPKKPKSLKAIAAEMKGWTACYY

SEQ ID NO: 1764 - protein, 294 aa, synthetic construct
  REGION 1..294: note = Synthetic
MDGKEAILLDFQLSRDNNLWLDALNAKPDDRKPVCYNFQLKCDEKGRLYFIPSVTMVLENTYCNESFEDGCVSIDLNYDHVALTDIDKDGNRISGKVLRFNPENKTSGQISDEIGRIMSKVGQYCEDRKKPLVMEDIDTTISKHGMKYGNAKGNRHASIFAYRKMESCIENQSYRRSFGVIKINPAYTSQIGKILYMRRLGISIHEAASYVIGLKGMGLRDKLTLEEEMAARLTDSLKKELSDGEDIYSLMKVWKYISSKLSGICTHSFYRSIPYEYKKGMDSQKLESRRSQNL

SEQ ID NO: 1765 - protein, 554 aa, synthetic construct
  REGION 1..554: note = Synthetic
MRYYLDEGLMTNADSFMDTMKIFNLAKIDLYNQKYKEKYNNNGILTTMKPHQFLKNKYNVNAYYQASINSAADGQISSQKELRKFYKSSFKHDTASRENKIKTVQTELDKKQDIKNSIVNYIKTGRWVKPYPRCRVKICGFNVQAPGIKDKMSIDEYERKTEARIRILKNKLSHLEYGLKRKQQKIDNIDTLPPRRIIFGSRKLFSKKDEAEINKTEWQDEFTFKRMSSMSLPGRHDAKYCNFLCRYIDGSLHLTNIDGSETVFKDFKLSRLNDEYLRFFSASRAERKPLCYNFSLKKDQHGRVYIIVSVTMVLENPYVNYSTEEGCVAIDLNYDHVALADIDAQGNLIDSRVIHFNIHNKSNGAITDAIGRAMSEVGAYIEARCKPLIMENINTSKSKHGMRYGNSLRNQKASMFAYHKMTTCLFNQAYKRGFDILQVNPAYTSQIERFMYMKQYGLSVHQAAAYCIGLKGLDMTDKLKPDNRLLELLPQSLVDSMNQSHYDLCKVWRAISTPFSGVQNRFFYIGIPYDVLNERQRPSIRTLSNEMRSWDGLF

SEQ ID NO: 1766 - protein, 559 aa, synthetic construct
  REGION 1..559: note = Synthetic
LTINADKRYYLSEDNLEGGKDLIETIGLFNDYKMDLYNQLFDSRFHSKGPLAGQTYSRYLKGKYSVNDYYACAIYGAASGTVSSQWERNVMNIRSLNDQIKVKQGKIASAQKDLDKKRQIKASIVTYVKTGKWNKPYPQCKLKVSGKTIVTYQRKKVPLDCYERTIEADIRFLKKKLSNLKFGLDRSKKKLEKMAKKLKKIVFGSRVFYSKKDQPDTDIKQWKKEFNERRHHSMSLPGRHTSKVGNFLAAYDLKERTLTIRCMNGRKCVFKDFQLVRYQDVFLSKFDVSPKERESICYNFKIEKDEYGRTYIIPSVTMSLPVEGQNCGFSNGCVSVDLNVDHVAVSNIDARGYRLESFTVPFDLKGKTSGQISDILGRKMSIIGAYCEKVKKCLVMEDLDTTGSKSRLQYGSKLRNRKISSFAYKKMTESIRAQGYKRNFAVYKVPPEYTSQIGKMRYMRQMGLSIHEAASYVIGLVGMGKTELLGLPLELEELLPESAPQDLKKRWAMVSRAFKNIRTHAFYQRVTPADWSGRKKKGLKNYAAILKEKDDLSPIPSKA

SEQ ID NO: 1767 - protein, 579 aa, synthetic construct
  REGION 1..579: note = Synthetic
ISRTINSDKRYYLDEKTIENAASFLETMRVFNDAKMDLYNALYDQKYFGTGPLLEHAYPVFLKERYQTNDYYNAAIYSAASGQLSSQKELKKYYKTTIAADLKTRDEKIQSVKEQLDKKKAVKNSIRLYIKTKKWITPYPKCQLKVRGQKIILFNKTIVNLDEYEREVEADIRKLKTRLALVTEAKKRKAKKLENLENLPPERIVFGGKKLYSEKDAIEVTKSADLSNEKEQKISKKASDEWKQDFFEKRHQSMALPGRHTSKYGNFLCKYDGKDLSVTCIDGSVTTFHDFKLPRCEERFQKNFTCKPEDRQSLCYNFILKRDKENKQYFIVSVTLKLHAYENSYYGNGAISMDINYDHFALAELDETGKLLDQKLIRFDLMKKSTGQITNILGTAVKEVFNWCAEKDKRLIVEDIDLTIKLASRKYGNRKGNHHMTLFAYQRIASSIENQSLKQEIAFCKVDPAYTSQMGKFLFMRKYGISIHQAAAYTIGLVGLGLYEKLAPDSRMRNLLKTKEGIEPEFSKETYKNIWARITNTFSGIPKHFFYRRIPYEVLNERKRPSLRTLAAEMKARYMPVFE

SEQ ID NO: 1768 - protein, 468 aa, synthetic construct
  REGION 1..468: note = Synthetic
VKEQLDKKRAIKNSIRLYIKTKKWIKPYPKCQSKVRGFKIILFNKMMANLDEYERKVEADIRKLKTRLALVTEARKRKAKKLENLEKLPPERIVFGGKKLYSEKDVVEVTKSDDSSNDKDQKTSKKASNKWRQEFFEKRHQSMALPGRHTSKYGNFLCKYDGKDLSVTCIDGSVTIFHDFKLPRNEESFQKNFTCKPEDRQSLCYNFILKRDKENKQYLIVSVTMKLKAYENSYYGNGAISMDINYDHFALAELDETGKLLDQKLIRFDFMNKSTGQVTNILGAAVKDIFDWCAEKDKRLIVEDIDLTIKLASRKYGKRKGNHHMTLFAYQRIASSIENQSLKREIAFYKIAPAYTSQMGKFLFMRKYVISIHQAAAYTIGLIGLGLYEKLVPDSRMLNLLKTKEGTVPEFSQETYKNIWARITNTFSGIRKHFFYRSIPYEVLEERKRPSLRTLAAEMKIRYMPVFE

SEQ ID NO: 1769 - protein, 555 aa, synthetic construct
  REGION 1..555: note = Synthetic
KKTVNADKRYYIDEGLLVNPGSFLKTLEVFNNAKICLYNLLYDKEYGTSDPFAKRSYVSILKEKFHIDDYYCGAVYKEAAACLSSQKELRKLYLKTTAAEIDTRQRKLDDTLDQLEKKQAVKASIKTYAKTGKWIKPYPKCRLKVSGQTISGDGIKPTPIEEYEIRVEESIRSLKNRAKMVAHGLKRKQHKLHCLETLPPRRIVFGTRKMYSAKDAEGADRAAWKEGFWFRRHSIMMLPGRRDSKYGNFQCRLINGDLYVACTDGQEAVFKDFMPVLFEDTFFGAFQKPRADRKAVAYSFRLCKDEDGRPYIIPFVVLDMEAECSADYSEGCVGADINWDRIDLTDIGKNGERLDAKTIRISLEGKTTGQITNEIGRAMKEVQEYCLERQKNLVMEDIDLVIKRHTLQYSSPTGNRHISLFAYRKIAECAKNQSLKTGLGIRFVDPAYTSQAGKHLFMRRFGISIHSAASYAIGLVGLSIYGKLMPDIRIQELMKDEPYFPVPGDYKKAWRKVTNAFKGIRTHRFYGRLPYQEMKEKPLATIKTLANAMKQPAFT

SEQ ID NO: 1770 - protein, 583 aa, synthetic construct
  REGION 1..583: note = Synthetic
KVTVNADKRYYLDEKNIVHPDAVITTMEIFNAAKIGLYDAFYDKKYKAAGPLTEISYASWLKETFHVNAYYAAPIVRYANAALSSQTELHQMYIRNGFEDIKTRKGKITATEEDLAKKKAVKNSIREYILSGKWIKPYPKCRLKVCGKKICLPGAKEIPFTEYERKVEQDIRSLKNRLSMLRFGLQRAEAKQQARIDHPPKKIVFGTKDYYRQKDEAGERISLWKEEFFFRRHRSMSLTGRSDAKGGNFLVRMEGSDLVVTCLDGTKTRFCDFQLTRYAEEWKENLVADRSDRKPLCYNFVLHKDEHGRKYLILSVTMELDDPYVNHSFSDGCVSMDINYDIIAVSDISKKGDRIGGAVFPFDIRGRSSGQVSEIIGRTMAKVGKFCADRKKPLVMEDIDLILKRNGLRYGPAKRNRHVSLFAYAKITACIHNQGYKQKFAVIEINPAYTSQIGKFLYMKKLGISIHEAASYAIGLKGMEMLDKLLPDKRMYALLSEPARSRYEEKKDTTSVMGLWRMIYRAFQGVNTHMFYRNIPYEVLKEKKRPTFICHYKGKGQHSLPERNETASGTQPEKRCFPAGFLL

SEQ ID NO: 1771 - protein, 562 aa, synthetic construct
  REGION 1..562: note = Synthetic
KITVNSGRYYAEDMAPGAFDACMSALSVYNTAKIKLYNAMYEHRYHEGSDHDVLGKPGVTYASFLKECAGLNAYDAASLYSDVSGILSSQREFRKWYLQTQTEDLKARKAKTASLAKKLDQLLAVKQTLVTYAKTGRFVRPYKGCQLKISGQKACPYGKKTFPLADYERSVEQQIRRTKARLHSVRAAMKRKEARLERFAGEPPARVLFGSKAFYKTKDTVGCDDTWKKTFHERRTRSMMAAGRHTSKSCNFVVKPDGAGGLVWNLPAGLGAVTFPAFRLRRYHKEWTDCLQQNAENRQAVSYRMKRMRDGHGREYLIVSATFMLPEHEAPADLSDGCIACDLNVDHLAWAELDKSGAMIRYGIIPYHLEHLSSTQRDQIIGDVVSRAAVLNKETGKALVFEDLDLTAKRASLKYGNKKSNLLISAFAYKSFRAHLDSQGFRKGFSAVYVDPAYTSFCGKVIFMRKFGVSIHVSAAYCIGLRSLGILDDLTIPDHLGHLMDTKKEQGPYYVAEKISSLYTKLKNIRTHAFYLDLPDVGTVTKLKTWLRVNDQNKPAWYAADF

SEQ ID NO: 1772 - protein, 543 aa, synthetic construct
  REGION 1..543: note = Synthetic
KTTVRTERYYLDEMTDEKQRLDFMKMKVTVQELSAIRIRGYNAYWFYKNSPEDPRNFLDDTVKSPVYAYARSLGLSSYYANILDPVITGIYKSQETNSKNRIDDLKADISETKRKLKSLKSSLANTRKLKQSLVRYGTTGKFSKPYKCCRLGIDSDGMMKGTQKPCTWQEYEHTIDERIRSKRAHIGQITDRLHRLEQNLKKVKSEPPKRSIFGGRRFYKTKDTVGCDDAWKRAFHDARYGSFTVGGRADLDGRNAVVLYENGGLTWTLPFGLGKARLEKFVPVRFSEKYYAALENPKYPIAYTFAFKTDRDGREYMTVSVCFTVPDERKAFDASHGVIGVDLNADHFAWTETSPSGEKMKSGVIGFDVLHATKGQTDEALGRAVAELIGICMAAKKPLVMEDLSMKNARRGMHYQGRLRNRIISQFAFDKMTALIASRAERNGVPVRCVNPAYTSLIGKTVYMRKYGISIHEAASYAVALRGARLEPPLLPSGIMALVPEKKRDGIVIGDWSDYFRLLKALQAAVKKIPKHMFYLPPERIPH

SEQ ID NO: 1773 - protein, 553 aa, synthetic construct
  REGION 1..553: note = Synthetic
DELSSAEQDMVRLTFLRYNRMKEWYYNQSYNEKYLGIPFAVDGKTETALLKEHYRALYGGKLSDYYITSLFSSVNGMRKSQKELIKLAEQERMQRQENRREKADSLKERLVWMQAGKDWLKAFGRYLAGKGAEPKAPSVQEQGFTYSGGKLFYRGKKNQLMEEDPFVYERELEKRIRQTKARIAQIGDKIRRTDEEAGRIPSRITFGSKKQYKKKDTLSLTGKDLEAWHQERDFARNRIVNFSGRAVSPDGNYLCKYDPERHTLEVTMINGEKILFHEVHFPYRGEELGQYLKDRKGSVGYMMECKKDGNGREYLIFKATLTVKKESLNHSTSDGVFAYDFNYDHIAWADVSLNGNLIKAGVIPFTLDGLSSGHAKEVLGVAVKKLVALATDRRKPIVREDLDFVRKKRQMEYREKRQNRKLSALIYSKAAAMVEARAFREDTVVLKVNPAYTSLIAKVKYMKLKNLSIHCAAAYVIGRRGMGFSEKLPSYLNHLVPKTRKNRWRTVFTHAKKAGSSYFREDLPVWDKWKQFDANVHNYNENYALWKESYSMQ

SEQ ID NO: 1774 - protein, 329 aa, synthetic construct
  REGION 1..329: note = Synthetic
LEAWHQERDFARNRIVNFSGRAVSPDGNYLCKYDPERHTLEVTMINGEKILFHEVHFPYRGEELGQYLKDRKGSVGYMMECKKDGNGREYLIFKATLTVKKESLNHSTSDGVFAYDFNYDHIAWADVSSNGNLIKAGVIPFTLDGLSSGHAKEVLGVAVKKLVALATDRRKPIVREDLDFVRKKRQMEYREKRQNRKLSALIYSKAAAMVEARAFREDTVVLKVNPAYTSLIAKVKYMKLKNLSIHCAAAYVIGRRGMGFSEKLPSYLNHLVPKTRKNRWRTVFTHAKKAGSSYFREDLPVWDKWKQFDANVHNYNENYALWKESYSMQ

SEQ ID NO: 1775 - protein, 269 aa, synthetic construct
  REGION 1..269: note = Synthetic
SIGMMDRTTLCFPVHFPYREDDLRSILDHKKEKGYTIAYWLELHKDKAGRDYILIKATFPLRKSVFQDTRGGVFSVDLNLDNISWAELDGKGNRLRGGMVRFSLDGTSGQNKDTIGKACREIMKLCIPTGKPLVMEDLDLTKKKSQMAYGNPKANRGSSMFAYSKMISFLEGQAFRAGIGVIRINPAYTSFIGKVKYMRRNRCAIHVAAAYVIGRRAMRFSEKVPSYLKQLLEEKTLRRHHWAHFAALFKNKMVREIRNFNIMIPAFSK

SEQ ID NO: 1776 - protein, 574 aa, synthetic construct
  REGION 1..574: note = Synthetic
YNGFQLNKEDDKEDTVYKYVKNRYPMFDSYTIINVIGDATAILKSQMETFELNKQTKESKLDATMEKQSDLQIQLKRFLTIKEQLIDRSKKIKNNVSLIGVKFQTYQGAHHGLKDTNKNIFYINNKEVSLVEYETFIDSRIKKIKTTLGLLKMSIDRRKNQLEHMDKPQKICFGSRKLFKSQHTKYHNHNLWKRELYFHKYHSVKMTGRADLYYGNATVKYNKTGNHVLDVSYIDKNGKSKEVHIPDVVFPYGQDIIDEYIKTQNLAVKDKTKDRFPICYTFSIKCDEQWRPYIIVSVSVPLPKKKYVNYDVSTGVVSIDINVDHIALTELDKNGNLIYQRVIPFHIYHKNKGTVDHELSKITNEIIQYCMKKKKCLVVEKLDLEQKKRKLKYENKKYKVLLTGFAYAKIINFLKSKAYKNDIYIYFVNPAYTSQIGKWKYMKKLGVSIHIAAAYVIGRRGMGFIDKIPRYLNPVLTNYEYKTDIEIEQELRNKNKRKRQPKEEKDLLKEIVEKQKAMHEKHAKQYDTKWEKYKSLMNKITILKKHHFYQTYKSYEIMDLIKMEKQKERLKYTK

SEQ ID NO: 1777 - protein, 581 aa, synthetic construct
  REGION 1..581: note = Synthetic
SKSVIKSNRLYLDELKEINIDIQPLIDMFVPYNTAKFRAYNLFYDAVFLNKEKFTRDLENKIKLCLKNEFHFDDYYLSNIITDAKGVIKSQIELQSLYQDQLNDELKAIKTKISSTKKLITKFSTNQKQLIKYNKSIKEDKLLKKWKFKNYPLAHHGMKNPDELDKSKMHFFTYKDEDVDFYTYSCFIDKELKKLRNKLGKLNFAKNRLIEKQKTLTVPKRVCFGSRKLFKSKDTTDIAYKEWKEQLYLHKYSNMLFVGRYDATYGNHAVFYKNNTLILELLKKYTLSTNQKNITKSMKTYLKIPNVVFPHNQKKLDDYLQKQTTITSNTKAKKNQRTYLPLAYQISLHQDGNKRKYIIITAILSLEKKTHVNYDVSTGCIAIDVNVDHLALSDLDEKGNFLGGKILPFNIYHKNNGTVKHEISRVTTEVINYCKEKKKCLVMEKLDFKKKKQNLKYQNKKLCFLLNGFAYKKIYEYLNSKAYRNDIYLYQVNPAYTSLIGKVKYMRLLGISIHLSAAYVIGRRGLGLTDKIPKYLRDLLTVDERKKHQWSQYAIIAKKTANLKKHDFYKKLTYHDILLTT

SEQ ID NO: 1778 - protein, 399 aa, synthetic construct
  REGION 1..399: note = Synthetic
SSIKTENKRIETDNLIVNMTNYGMENILLSEYLNGVIACEMPALFHDEAIKAGIVAARTFYLYKYESDKDYKPSNGDQCFFSESKRKENWKDNYELYNEKILNNINLTKNEVITYNGSVIKAFYFSMSNGYTEDAVNVFKKSEPYLVSVISVFDKDVKNNLSSKSISVNEFKEKLNVDNDMLTYRSTQKDIVFKMQFHKYKDELYARVNEKHNSPNKAVAYELMDYGEYFIVKAIFEKHMNLPKTNILYGAIGIDINVDHIALCETNMDGNIVLIKKYPIHKENTKNKRNEELYQLAIEIMEFCKSKKKSLVVEDLNFKQLKTRMLYRPKKQNKTLSSFAYKKILEKVERKCLMNEVDVIKVDPKNTSKIGKEKYTKIKGLSVHYCAAYVINRRGDVSI

SEQ ID NO: 1779 - protein, 210 aa, synthetic construct
  REGION 1..210: note = Synthetic
MVFKVQFHKYKDELYARVNEKHNSPDKAVAYELMDYGEYFIVKAIFEKHMNLPKTDTLYGAIGIDINVDHIALCETNMDGNIVLIKKYPIHKENTKNKRNKELYQLAIEIMEYCKSKKKSLVVEDLNFKQLKTRMLYRPKKQNKTLSSFAYKKILEKVERKCLMNEVDVIKVDPKNTSKIGKEKYTKIKGMSVHYCAAYVINRRGMGFVN

SEQ ID NO: 1780 - protein, 526 aa, synthetic construct
  REGION 1..526: note = Synthetic
MKVFSMSQRIYYKDLEPEAESIIKKDLELYNCMLHKAFKICFDRAYKDVTYSETDQRMIKSFYGTSDYFPLSAIYEAKALVKSLKCLEKENQDMIKTRLKKINKKIKKNEKQLKKALKEKEKLINKSKKKKYTKEDYLYEVQELDPNIKRLKSIIRNLKFRRNRNEFKLKRKMPSVCFGGKKNLKNGDLETFRFRRQRRMLIPGRRQGKYSNNLFKLNVDTDMLTYRSTQKDIVFKVQFHKYKDELYARVNEKHNSPDKAVAYELMDYGEYFIVKAIFEKHMNLPKTDTLYGAIGIDINVDHIALCETNKDGNIVLIKKYPIHKENTKNKRNEELYQLAIEIMGYCKSKKKSLVVEDLNFKQLKTRMLYRPKKQNKTLSSFAYKKIIEKVERKCLMNEVDVIKVDPRNTSKIGKEKYTKIKGLSVHYCAAYVIAKRYGVDVTGFNLEYIAQRNECGKKDPQELRDFLNDVRQASYSIRNHIERNFGAKEQEYVTDEFAIGDPVKTPETKDEKASGKEKKAKNQPER

SEQ ID NO: 1781 - protein, 480 aa, synthetic construct
  REGION 1..480: note = Synthetic
MKVFSLSNRFYYREFPDLKNTVLHDLDVYNRVLHKAYKCLYDRAYKGASFKDSELHQLLKKQFHLNDYIPLSAVHEAKALLKANAALNKKLIRKTDKRMNRIRMKIREKETELEKVICEKEKMIRKTKLHGTTEKDYLYEATVIDPKIKNLKNQIKLLKYRLTGEKQKKERFMEKPKSVCFGGRKNLKHDMDTYRYNRRKRMLICGRRQGKYGNNLFKYHIDEGILVYRGIRQEIRMPVVFHQHREHIERAVRMKHNTPGKAIAYELYDHGEYFIIKAIAEYPGEPVLPSGRGSIGMDINRDHIALAETDRKGNLVKAWRIPLKERGTRNQREYERYVAVKRIVEECAGKKKNLIMEDLEFERKKEESLYRDRNYNRMLGTFAYKRLEEKIERKCMEKGVYLRKVDPRHTTQIGKLKYAKRLGLSIHHSAAYVIARRGEGYRERIPNEYHEYREWKEVIRDLGKATLEECQRTPYLCLFR

SEQ ID NO: 1782 - protein, 490 aa, synthetic construct
  REGION 1..490: note = Synthetic
MKCLSYSNRFYYNELSEEDANCIKKDLILYNSMLHTAYKKLYLTCFYGVKEAVSLEKQLKAKYGTNDYFPLSAIHEARALLKSNIETNQRLKKECTKRIERIKEKIRKENKTLQNWQKQKEQLIQKSKEHEISEADYLYEVQIVSPNIKQLKHRIGLLTFKLNRETDKLNHLNLSVRAACFGSRKKLHHDLEAYRYERRKRMLITGRRQGKYSNNLFKYHLESGIIVYRGTEKEVHLPIQFYHHADKLERAVRLPHNTAGKAVAYELYDHGEYFIIKAIIEVEPKVIITKKEEGSIGIDINVDHIAVAHIDRQGNLCRQQILPMKLKGKTRNQRKHEIAETASKIIHECVHTQKPLVMEALDFSDKKQKQRYQPKGLNRMLSEFAYSQITEAIERKAAYERIEVIKVDPAYTSLIGKLKYVRDKGMSVHQAASYVIARKGIGYKEKILREYRVFVKEKQTRAEQWAAVAEKVGKASIKECQLTAILALFR

SEQ ID NO: 1783 - protein, 256 aa, synthetic construct
  REGION 1..256: note = Synthetic
VHLPIRFYHHAEKLERAVRLPHNTVGKAVAYELYDHGEYFIIKAIIEVEPKMIVTKKEAGSIGIDINVDHIAVAHIDRQGNLCRQQILPMKLKGKTRNQRKHEIAETASKIIYECVRTHKPLVMEALDFSDKKRKQRYQPKGLNRMLSEFAYSQISEAIERKAAYEGVEVIKVEPAYTSLIGKLKYVRDKGMSVHQAASYVIARKGIGYKEKILREYRVFVKEKQTQTEKWAAIGKKIGKASIKECQLTAILALFR

SEQ ID NO: 1784 - protein, 481 aa, synthetic construct
  REGION 1..481: note = Synthetic
MKTITLSQRLYYKELDEDLYPMIRHDLMLYSSILHTAYHQLYDIRFHNVPKPKNMIRDLKLKYGTNDYLPLAAVHEARALLKASIESNRLHQKKVEKKIKRITNRMKNNEKKLQKIDKQLQMFIEKSHHKKTTKADYLEEVQVWKPKKKQLKNEQKMLLFRLHREEYRLSGLKKRVKQCCFGGRKQMKQRTTMPYEDWKREYRLKRTSRMLIPGRRQGKYGNNLFKYHVSENKLIYRSASGRDIELPIEFHYQKEELIRAVKMKHNTPGKAICYELRDHGEYFIIKAIVEVVDKDIQMQTCNGVYGMDLNIDHMAVSETDANGNLIRMKIYTYDLKHKTSNQRKAILRDTIKNLGHDLKGNRKPLIIEKLSFENKKEQMLYENKRQNGILSEFAYGQIKTMLYSRMRKDDIMIQETSPYLTSQIGRLKYSRRMGMNIHMSASYVIARRGMGLTERIPEELKCYGKKNVKRITQWKKISKEV

SEQ ID NO: 1785 - protein, 482 aa, synthetic construct
  REGION 1..482: note = Synthetic
KITISSTRVYYHELSNDTALAIQNDISLYQSMLHKSYRELYHNNSINSRYLKDIYHTNDYFPLSAISEAKGILKSQKTWHHKFISMKKKKLKKIERKMNQEEKFLKRYKMTKSTLVALSKAITHGERLPPVYRCRDMKWYSRDPLHCYYRNQYMLLYIFEVQHLNKLMKATRHRIRMLKYRKTRMEHKIEKLEKRMKQIRFHKNRYMKITGRSQGKYCNNLFKYDHEKKTMTYIDTYQRRHAFSLDFPYRREELIRVLNLKHATKGKAVCYTLKDKGDYFIISAAIELDVKYEGCLFEITGGTVGIDINNDRISLSEIDRQGNLIYCRDFLFDLSSKTSSQRKWIIENTVKQVIGYCREVGKPLIIEELNFEKKKKDFELYNQNKQYQRMLSEFSYRKIIEKLYSRSYKERIGINEVNPAYTSIIGKLKYARQKGISIDKAASYVIARRGMGYSERLPLKQYQQINKPQLTRWRNYSQLAAE

SEQ ID NO: 1786 - protein, 543 aa, synthetic construct
  REGION 1..543: note = Synthetic
YTVTIYSDRMYVQDLNIITIKQIETAILQFTKEVHSAYNRAFLYSFDSNQFVKKYGDKDSLYKLTQQHSRFNCYYINSVNQLAKGKIDSQKELYKMYKKDKETALKAVNKKIKEETERLEHYQKLLKNYDDFRHHKINKIKFGKLKHLAYKNEMFTVRDLKTFEVTNYKPFQFEYEYLRPKIKSIKNKISKLTYRKNNIETKLKNLETQKHMVFGGKRNLKNLTTDELLNKKYHSIQVSGRYDSKYGNWLVHTTPLDKDMFAINFELPNREIAHFKVHFPYRGKELKKALESNMNQTVNTPISYGIIRKKDALNRIYYQIEVNFNIGSTLPRINTFIGDGCVGCDFNNGHLDWSEIDKHGNLKDCGTIYYQLNGTSKENELSLRNALNKLGTIVSNKKKVLVVENIDLKATKRKSTYQNKKLNKITHTIPYARYLEMVDYLGYKFEFLVIKVHPAYTSQIGKLKYQDKMKLSSHISASYVIARRGMKYSHNEHIPKEYKHFIQDIKEKHYWSKFNKIYKELEKQKKKKVTKKHKTKQQTVNNK

SEQ ID NO: 1787 - protein, 258 aa, synthetic construct
  REGION 1..258: note = Synthetic
NGKEYVLNVMFPYRSSEFKQVLENNFNKSLNTPIEYGIIKKKDSLGRYFYQVKVTFNIGSTKRQINTSMETGCVGCDFNAGHIDWSDIDEHGNLVDYGVIKYELTETSKENELSLRNALNQLGQIVSRKKKILVVENIDLKSARRKSTYRDKKLNKVIHFIPYARYLEMIDYLSYKYEFLVVKVHPAYTSKIGQIKYQDLMKLSSHIAASYVIARRGMKFKTNEKIPKRYRYLITDIKTKHYWSKFNKLHKELKKLKK

SEQ ID NO: 1788 - protein, 526 aa, synthetic construct
  REGION 1..526: note = Synthetic
TITIESNRFYHLSDETKEAIDKTIASFNRAVYSSYNLHFLKDTDSESFKSKYKDKSLHMIIKQKYEFDDYYSNSVTQLAKGKLNSQKELQKEYIKTKEAALKSVKTKRRDYEKLLSDYIRLLESLHRYRTKIKIEPNAKLIVKGIRNLSVSSYDITVRYFKSRQLVSETYGLYSFEYQYLIPKIHHIKTVLSNLKYKENRLHEQLQNLRTMKRIIFGSKKLMRTHTAGDKRLGERKYNSFQISGRKDAKYGNFVFKLHELESGTKESPVFQLTVRMCDKKEITLNHIKFPYKGMELVEVLKKKTPICFALKRKTDKQQKEYYQIFVSFDISVTKDINHDTSTGIFGMDFNYSHLDISEIDEKGNLVSVVTIPYQITGDSKVNERELRAALNIVGMMVQKSHKCLVIERLDTRDSKRRSTYRDPITNKIFHTFAYERYSDFVDWLGYQYGFEIIKVNPAFTSIIGSLKYAIPRKLNSHQAASYVIARRGMGFKENITKQYRPLVDNPNKHHWSQWNQIHKKLQVVNK

SEQ ID NO: 1789 - protein, 566 aa, synthetic construct
  REGION 1..566: note = Synthetic
YIVTIYSDRMYNLEPDICDTIDKTLYIFNRAKLSSYNMAFLKEIDPLTYALKYGNKSIYNIIKEKYKMDTYYTNSAVNEGVGSFKSQVELNKLYKTQKEEAIKAIETKLKEETKKLEKYIILRDNLIIYRHELKEESKAKKLKTSFPNISYNGYNIIVRSLKNKKIKTYEYGLYSFEYDYLNPKIKYLKSKISKLKYRLNNTKTKLKNLDKIKHIRFNKNTKYNSYLISGRSDGAYKNFVFKATPHEKDNYFYFDINTLFPGGFNYTFKDILFKYRGKELKEALNHKYPIAIGFIKKKDGEGKIYYQFKVAFNLGETSSLNKSKENGIVGIDFNYGFLAISDIDSKGNMVNSFTIPYEITDNSKQNELNLRYALNKIGEYIKRKGKTLVIEDLDTSKSKMKNTYKDPKLNKILHSFPYEKYIQITKYTGIKYGFLVKLVSPKYTSIIGLLKYSYKMKLNSHIAASFVIAHRGLGIQEKVPFCYKHLIPKEIRYKHNWSKWNKLNSINKSNIKELKKKDKKNKEYKNYKNTVTLYNGSEKVHYLTKEDIKLKKEKEYNQKLNKILLF

SEQ ID NO: 1790 - protein, 564 aa, synthetic construct
  REGION 1..564: note = Synthetic
YTITTYSNRLYTNEDKEHQQIINDDFIKACDDTLIKYNKMLFSIYNLLFMEKFNNSRYLEITKGLSLFKYLKNKYNIKTPYINSLINEAKGKLESQISNNKNYINYYEEVIKTIEEDLLKLEKTLKNYLKLRDDFINYRNDIKNNRNYILKVKSEKGCGKYAIKNITFTEDKVYVRFLNKKKQRNCKVSALQIKEYGFIDFEYNYLNKKIKKLKELISKKKFKLNNKKGKLNKLQKIKPITFRTNLLNKSNSIFKTRKERIKAKTAFRDSKYDKFLISGRCDAKCGNYILKLTHIPKTNDFDITISFLSKEISLSHIDFPYQKEAIKNILLKNTNDFKMHPICLGIIRKYDKLRNKYYYQIKVSIDLEATKSYINEDISTGIIGMDFNYKHLDITEIDKYGNIINYFTINYDVNGTSHQNALSLREALNEVFTYANSKHKCVVIEDLDLIKTKNKNNKETKKKALNKITHSLSYDLYKRICEYESLKISSKLFYVNPAFTSVIGKLKYTPIKKLGSHIAASYVIARRALKFKETPIKEQYKLIPIEKTFNEFSMWSYLNKNLNK

SEQ ID NO: 1791 - protein, 544 aa, synthetic construct
  REGION 1..544: note = Synthetic
YKVTIYSERIYEDSNKISAVDIDNICKTIKTYCRTKYAIYNLSLLKITDNAKYLDILNGNSLHVYTKSRYGLNDYYANSIVRNVEGLIKSCRSNKDNYIKQYEEQIKDVKTNLKCAEKDFDKYIDFRQVFILARTFIKNNSDDKTNKKLIKELNKHFKHIKLTDSEIIVSKPFSKNKIIYGFYEFEYKYLNHKIKELRNRVRKYKYRINNLTNKIENLKKHKRCIFGSKQLIKKYIRQECTKQDLYNAKYKEFEISGRDNSKHGNFTFKTTYNTDTKDFTFIINLLHDKVLNLHNIKFPYRYQELADILKYNLDTEHKKKRTISYSIIRKKDCNNKYYFQIKAVFNIDYDKPHINFDKSTGIVAIDFNYGHLDMTELDAKGNLINSKTVYYSLDFNSHQNEISLRKAIDEIAEYANKQHKCIAIEDINIYKANQKANKDKHKQKILNYTLHRLPYEKYLQIMDYVTVKHSIDVIKVKPNFTSIIGKLKYSNNMKLNTHISASYVIGRRAMNFKEKPLSSQNLLLTSIINKSEWAKWSYLNKALK

SEQ ID NO: 1792 - protein, 345 aa, synthetic construct
  REGION 1..345: note = Synthetic
EEKATVVGKLILNDEVSLARLLTIMRQFRDAVELGHSLLFREKLSESEVKRRLTRILSNAWYAYSAIKVARLYKEQSKIRLRKPLLYSVGARCEKSNRNIRLVSTDKVLIKIPHASGKHEWIEVGVRFGKKYLPLMRELISGSYSYGAGVTIKLKGKKEDWRRVFREKLYLYLNIPVSLYVKYFSKRVKVKPRNRFYAGFDFNVDRINMVIVDSYGRIRDVRNIRFPEVVNYDKDKSRAIRQEALSKLVEYAVSHGVKYFVIEDLSKPNKIRGKIRKWSVREYQQQMEMLIKKVSGTLIKVNPVYTSIDAIGIALSRRIDIHTASAYLIALRGIKGYELIQKTII

SEQ ID NO: 1793 - protein, 203 aa, synthetic construct
  REGION 1..203: note = Synthetic
VINELISGYYTYGAGVSIKVEKNEDWRDVWSKRLILYLNIPINLYVKYMGSVITNVSSNALLWAGFDFNVDRVCMAIVDSAGRLRDTKTVFFSNAVNMPREVSESMREEALTELVKYAVAHGVKYLAVEDLERPRRVKGKVGKWALRQYIQHLRVLAKRFNLDILEVNPAYSSIDAIGIALAQGLDKHTASAYLIALRGLRHQ

SEQ ID NO: 1794 - protein, 346 aa, synthetic construct
  REGION 1..346: note = Synthetic
EEKVTIKGKLVIHDEIVLSKLINLMRQFRDAVELAHYLLFKRKLKDSEVKRRLTRLLSNAWYGYSVIKKAKLYQKQPHIKLRKPLLFSVGCKGLEKGNRNIRLVDTDKVLIKVPHANGKHEWIECKVEFGRKYLELVKELVLGEYPYSATITVKLKNKEDWRKVFRKRLYLHLIIPLDLYLKYFSRKPKNNIVGHVAGFDFNVDRVNMVIIDQKGIIRDIKNEHFPEVTSHGFPRNKAKATRRESVAKLVKYAREHGVKYYVIEDLSKPKPKGTRTAKKKIYRMALREFIQQMEVLVPKVDGVLIKVNPAYSSVSARIIAEDLGLDVHTASAYIIAKRGLTNLQKP

SEQ ID NO: 1795 - protein, 384 aa, synthetic construct
  REGION 1..384: note = Synthetic
KEKVTIKGRLIAGDGFTLAKLLYAMRLFRDSIEMAYRLMKKENLKFDETTKRVTKFMSNAHYAYSATKKAMAYLNQERLDLKKPQLYSIGKGCEKGNRNIRLISVDKVLIKIPHADGRHEWIEMEVKFGSRNIPIVEELIELTESDIPYSASVVLRKQKYYLYLHIPLELYAKHTAKVRVSTKAHLMAGFDINPDRVCMVIVDFNGQIRDVKTKHFPEVTLAGFPKSKAKDLRLKTLSELIDYACYHNVKCFIFERIRKIPKKKMKTRSTSRKVSKFAYAELLRHAEIMVKKRNGIFIQINPAYTSVDAIPPKQEIGIGHSHDFRIPFSDKVLKIYKHLSMPMKNLTVIRGVTSRVVFTPIGFNFNNNTSHKTIIGEFSNEKFA

SEQ ID NO: 1796 - protein, 333 aa, synthetic construct
  REGION 1..333: note = Synthetic
EARATIKGKLELEDLERAKVFYTMRLFKEAVEKAHHLIKKGLSKGEIVKSLYWTIPNTHYCEAAYAKAKLYSEQNHLKLKNPLLFSTGKGAGREEGNRNIKIKGNEVKIKIAHADGKHEWVTGKLIIQKRYLPILNELEDYGYSAGISLKDNRYRLHISVPVELYAKKDNVKRVKKEAKNIASFDLNSDRINMTLMRSNGLLIEARNKNFPEVNSPGYSENKAKDTRLKALSELIKYATAHDVKTFVFERLKMKGAKNISSKTGNRKMSKFAAREFLSHAEIMIRKRGGEFKQVNPAYSSKNARIINQDLGMDVHTASALVLGLRYLHTPKNI

SEQ ID NO: 1797 - protein, 368 aa, synthetic construct
  REGION 1..368: note = Synthetic
VTHVTVTGRITPLNSEDHVKLCYLAYRFRKNLVRAVKMYARGVDKQVIVKEITRELNLGYADTIYKMAKLIVEGARGNGSKPLKIKVRKLFIASRGFSANKGNRNIRLESTNTLYVNIPREGWVKFKVSFGEKYIPLVKELIELAKSRKYSYGARIVFRNGRIYLHLSVPVELYLKYFGKGEARGSLIAGFDLNSDRVNMVIVDKSGVIRDARTEWFPEVTSHGFPRNRAKVARLQALSKLIEYAYHHGVGVAVFEDLDRIKRRRFTCSPVANRKMSWFPKRKLLGHGVVMALKHGFNVYLVDPSYTSVVGGYLSRELGLDKHTASAYMLTAKYLGLDLKSLKVTQITRKPKTKQHTDSPRLLYLAVI

SEQ ID NO: 1798 - protein, 346 aa, synthetic construct
  REGION 1..346: note = Synthetic
VNYVTIKTKLEPEKREDYLKLALLAEKFRRAVELAIRLQLKGVKKSVGVKEVSRLVLNNWWYSDSAWDYAKMLLRGAEQNGGNPRHIHLKSKFLISKPKENEKGNRNVRIEWPNVRIRSNGEWLEFRMKTAEKFLPVILDVQKFKYGAQVVLKNGKIYLHVQVLFGIYLKHLGKITRGRLYAGFDLNSDRVNMVILDETGIIRDVRVEHFPEVNSSGFSRRKARDLRLKALAQLLDYAYHHGVGTVFFEDLGKIKRRNGKAAGSRKGNRKASNFAKKELLEHGIVMASKRGFKVYLVNPADSSKLGRELARGLGLDVHTASAFVIGWWGVNSLKTHENSQKEEQFG

SEQ ID NO: 1799 - protein, 354 aa, synthetic construct
  REGION 1..354: note = Synthetic
FKFVTINGKLVVDDPLDHMKLVKLARAYASAVRKLLNLIWGGHSHKEATKLLYNILPNYVYLETAYKNAKAITENIRFFEEYLGKNRILADIHRFWIASRGNKWDKGNRNIKLIPRDTYFEVLIKYPWDGSWIKARAFFGERYVPLLRELIELAGRREEGYGVVVSFREHPRIHIQIPLWLYLKYFSTSKPRGYGLIAGFDVNSDRLNVVVIDNDGNIVAVETFWYCETVSHGFPKGKAEWIRLNALSSALEWCRRIGADYVVFEDLTRIRCKRFTKNHYVNRKIAKFPKKQILIHGVIKALKLGFIVVLVNPRGTTNSVTHEQIMREKGLDRHMASAYMIAYRGLKVIRNHEK

SEQ ID NO: 1800 - protein, 242 aa, synthetic construct
  REGION 1..242: note = Synthetic
VKFHVFQDHVEVRVKDPWGKWVHGEAYFGKEYLPLLHELEELAERKEEGYGAVVSFKHYPMIHLQIPLWLYLKHFSLPKPVGYGLVAGFDLNSDRLNVVVVNKDGKVVTKKTWWYSDVTRPGFPKGKAMALRLNALSQALNFLSRVGVDYVAFEDLFLVKKRRFTRSKSGNRKVSRFAKKQLLTHGVVKALRLGFNVVLVNPKGTTNSEGHDRIMREKGFDRHTASAYLIALKGLGMLNDIK

SEQ ID NO: 1801 - protein, 367 aa, synthetic construct
  REGION 1..367: note = Synthetic
NYVTLVLPFNIGGDTAKRLLSTAWLFKAAVHRVLGVAKQSPALPGTDIGWKSAFRSIAYSVIPNRRYADGAVTLVRSIYESCRQLGVDFRSVELSSWLMFQQSEKEYPARNITLKHGYEVHVTTISYSKESHRDVIKPSIPKSYSALLSRIIEERQEYSGRVVVKGYGVRGNTLWVRGEVQITIPADFYCKHMAKYREPKGSLIGGVDVNVDRVNLAIIDEKGSLRDYKTFWFTEATVRRYPRKRARSVIGMRVHELLKYAYHHGVSTIALESPEVLGRLKLLWARRGDRKHEDYNYRKSVFRSSVIEMIALKAPLYGMKVEYVDPRGTTNSTEHDRLMKVCGLDRHTASAYMIALRGLAHQVKQMK

SEQ ID NO: 1802 - protein, 201 aa, synthetic construct
  REGION 1..201: note = Synthetic
VVIKSYGVEEGDLWVQEEVQITIPIDFYYKHMSKARVNNGRLYGGVDVNVDRINLVIIDDSGSLRDIHTFWFEEASRKGCNKHRARSIIGMKIHKLLKHAYHHGVKTMFLENPEVLGRLKLFWIKSDDRKHKNYNYKRTIFRSSIIEMITLKAPLYGIKVKFVNPKGTTNSEEHDEIMKRYGLDRHVASAYLIALKGLRHQ

SEQ ID NO: 1803 - protein, 371 aa, synthetic construct
  REGION 1..371: note = Synthetic
AEYITLRLPFHVTGVDAKLIYWTAWLCKLCAHRLLEAIKLNPSLAYLSQYDFIKVGRRLCYDIIPNRRYVDGISTLIHASLQSAKALKVDITKLEPKHWLLFQSEAEPWAKGNLNIQFVDYDKVKVLVFDRDKSSRRIIIEPVIPKGYIRLVKALVDKALKKEIGYPARIYITDYGERLEHLYGEIQVMVKYNFYLEVMKRYDKPLGDNIAGVDVNVDRLNLVVINRDGDIVWKHTVRFPQITSRGCPRKRAWSIIGEAIHSILRNAYSHGASVVAVENPEVLGYLRYYWIKNGDRGTKNYNYRISIFRNSIIERIVWKAPLYGLHVVTVNPKGTTHSKDHEYVMRRYGLDRHTASAYLIALKTRRNLQRP

SEQ ID NO: 1804 - protein, 375 aa, synthetic construct
  REGION 1..375: note = Synthetic
SYITLTLPFNVLGDDARILIATAKQFRLVTLKVFDEFLRDEKPPLSQFSMYKGYRKVGYEILPNRRYVDGAIDLVYGAIESVNELNRLYKEMGFNGEIKLEDIEWKNWLLFQCEGESQHMNVNIKIQEDLSFRVLAFDFDGDKSYIFIRPTIPKRYELILRNLWFYMQPYYARVVLKQFGNRKGVIFTHGEVQVSIDYDFYLDFMRRFDEPKGKNVAGVDVNLDRINLAIVSRDGKLRDYKTYWFREVKSRNMPRRRVLSLIGERVHELLKYAYHHGVSRIYFEDLSVLGKLKLIWIKNGKRFNENYNYAVQTFRSRVIEMIRLKAPIYGLKTSYVNPANTSKIGEIKAKKLGVDRHTASAYIIALRGLKLFNVV

SEQ ID NO: 1805 - protein, 371 aa, synthetic construct
  REGION 1..371: note = Synthetic
PEEATVRARFTVKGSEANWLLLTMARFKAGTQKALDVAKQGGTRFTDLVRASMSVIGNNRYARGSAKIVQGIIKSIKALQKLGENISLNDVELGDWWMIQSIGARNDASEKGNRNIRLVGGNTVEVLVFDGTSWRRIKAEYRASTRYNMILNEVAKLGMENKLGYLARIILLNYSHHRAYCELQVTIPWSLYVSHLPVKICVHGDNICGIDVNLDRINLAIVSKQGILLDTYTVRFPELKMQGLSRERRISTMMKAIHKALNYAVNHGCSLIVLENVKTLGYLRWAWIKRGDRRNSTWNRRVSLFTIEIAERISWYASQYGLKTYYANPSHTSKLAELIAKDMGLDRHTASAYVLALEYLGLNPRVICQNL

SEQ ID NO: 1806 - protein, 366 aa, synthetic construct
  REGION 1..366: note = Synthetic
INHVTVRAFSRISNRDVIAKLLFTARMYRLGVIIALECLEKNIPMKECMFKIKRFVSNQKYAHACYERAREMYKSAKKLGKEVRKLKQWLIFEAIGDKLDKGNRNIRLSSPNEVEVVVFTKNYGIERIRVPIKLLKTHVSIIRELFELGSNKLLGYNARCVIRDYSRDKALVEFQFTVPVELYLKYRRVYDKPRGRNIGGIDWNSDRANLAIVSSKGELLDHKTWWFPEVTSHGYPRTARRTQQSQILSEIMDYCYHHGCSVVVFEDPDIIKTRRCTKNATANRKITRWTKRDASQMFVLKALRYGLKPFFVNPAYTSKLAELIAKDVGLDRHTASAYILALEYLGLNPKEIYQNLHRPIKTFTLR

SEQ ID NO: 1807 - protein, 559 aa, synthetic construct
  REGION 1..559: note = Synthetic
SIPNTFTIRLNKVSDEVDAVLHRMMRRQRSAVRVAYNQFREGKSSEEVYARVRALFPEMDSYEVSSIRVEGAQTLTSQKALLPTYRTYLQKQITKLEKKQKRNHDKNRADKLRRIIRKLEETTAHIEHDTVKPAVFGGRKLLKQVERGVKGAKEQWKFERSNQYFLSGDKSAETGNQHFGLNVVSDRQVILSVRLTGTKQWLELPAEYSHNQKNLAFLFSQTHYRKAVRLIRIAPGQYKAHITADEHVTGKEIFGKQPATGEFVCGIDLNLDHLTASLTDKDGQFRGFRVFKHPNLGELPKNKSEQKIFALAKQVVDWCKSKKVATIVLEDLNIARSSDQSTTMNRRTVSFEYRQLHDAIVRRGQREGLDFKQVNPAYTSWIGELKYQTQFGISRHIAAAYVIARRGLGMKEALPQEFLAVLPKMAEEYESKNAKARSEKKKVKYTDRVKTLREWKKNSPKTTKHVWKLWGVLLNYYKEHKSEARATHAGCGNANGRTYLASLPSSGGNTPPVLRFGTVEKPPDGDLFSFKVWTTQGLLTLTGDTPDPLAVDWVGIVPV

SEQ ID NO: 1808 - protein, 501 aa, synthetic construct
  REGION 1..501: note = Synthetic
IVTSIRLEIDNISSEQDLLIHERLMRPQQSAMRIAYNRLQNKWTEREIWGDLRDKFPFLTGRNVNDAITQAKGILASQFELLPVDTEKTKRALGKSKNAQITNKSRPLHKRVKSLYLKVNQLQEHQANGTVPPVIFGGQHAWKDVVRRLSSARAQWRHRRSNQFISRGAKNNRGNAHCRLVITQDSELELHIRVPDKIKKKKSKQTTSAIWLQFPISYSKQFDTQLRDLATLGAIGQVSYTVRVIRISHQTYRAFITCDEFVEHREFSTFEAMPNWVTTACGIDLNLDHIAICITDRNGQFRRWNTITYPNLGELPRPKSKWMIGNIARDAVDWVKSHNAEAIVLEDLSIRRSSQSSRTNRRTVPFAYRQLAQAITRRALRDGLAVKTINPAYTSWIGRVKFAPMYGISVHVAAAYVIGRRGFGLDERLPQKLINRFPKIIEIIDYLAYSPDIDTEKLQEWRNRLMDWKKHTPNAGRPWLLWATLHGIKRISSEARSIILG

SEQ ID NO: 1809 - protein, 521 aa, synthetic construct
  REGION 1..521: note = Synthetic
TIIATITGIISPQSESDIADIYGLMSDSSSAKKMAFNRIVKDGVDDRGAIERYIRQRIPTFNTRYARDAIIEAQAIILSQKELLPMYLQNTQKKLKKSVAKLVDYVTEDKKPKTDLLVALKGLCNRIGKLKSRITELQSHINNGTIPNIVFGGKNNFKKLQKGLISRKQWKDLRTNSFYSRGDASKQGNLHTRLYYNEAEDSFRIRLSIPQDKGRCKYIYCPVSIASAKRHKSRRETLISAVQNNASYSVRIIRRNSNIEAHITLDEVIYGSFVKKIPESVTTIAGIDLNTDRLAVTLSDYKGNFIRHKTFYCHDLEHCRTGQRDFTINHVVKEMFEWLTTNHTEVVVIERLDFKQDMDTNAWLNRFRSNFTYSKLHKAITRKALRTGMFIKTVNPTYTSQIGTLKYAAQYGMARHEAAAYVIARRGLGYNERIPKRIIQNLPDIISTLIQKASGAKEAAKKKLTAHIKVLKQWKAYSPVSTIHKWKLWSLLYQSLPCPVFPMEGIAGVSGQAAPLTGAGP

SEQ ID NO: 1810 - protein, 365 aa, synthetic construct
  REGION 1..365: note = Synthetic
LKEYFVGRFKQLTISVQKYIFYHKVLLMLITIKYIRDYYSLSRISLINWEKQGLLKPYYTPGGRRRYKREDIEHLLGIKKESPVKPAVVCYARVSTAKQKDYLDNQMQRLKSYCKAKGYRDYHIISEIASGVNENRRELRTLSDYKGNFIRHKTFYCHDLEHCRTGQRDFTINHVVKEMFEWLTTNHTEVVVIERLDFKQDMDTNAWLNRFRSNFTYSKLHKAITRKALRTGMFIKTVNPTYTSQIGTLKYAAQYGMARHEAAAYVIARRGLGYNERIPKRIIQNLPDIISTLIQKASGAKEAAKKKLTAHIKVLKQWKAYSPVSTIHKWKLWSLLYQSLPCPVFPMEGIAGVSGQAAPLTGAGP

SEQ ID NO: 1811 - protein, 519 aa, synthetic construct
  REGION 1..519: note = Synthetic
MKTTRACKINSITKEQTEALITLIRTFESAKRYSFNRLIEGENEKELIKKLQLKYLLNKRFCEDAVLQAQTILSSQKELLPVYLENNQKKLEKTLQKTLQKKDDYESGRKNPKKVSLEICLIGLRKRQQKLEQKIEMYETHIKNGTLPPIIFGGRKNFYERMKDKISNQEWKDLRTRQLYSRGDKSKKGNLNMRITVDDCGQGWLEIANPLERTNGKTKSPRIKVPIMIPYRFYHQITNVVMGKQIGVNSKGKPIIEHQKYSVEIIRKQNEFYVNITFDETKIGRVLDFKETPQSDVIAGIDVNPDRIAVSLCTKQGNFKGSKIFYLHNLNTFSTNKRATIIGQIVQPIKTWLLENNVGGIVLEDLKFQQSHDTDKYSNRNFHQFTYKKMLNSLIRMALRNGFSVKTVNPAYTSVIGKLKYSKNFGISVHEAAAFTIARRGLELQEQLPQEIILLLKNQITTKLRILVASMEESKKNTQKVYKKWLQTIQTWKEYHNWKLWSILHKIVYMNNQQFVFKI

SEQ ID NO: 1812 - protein, 358 aa, synthetic construct
  REGION 1..358: note = Synthetic
MKDKISNQEWKDLRTRQLYSRGDKSKKGNLNMRITVDDCGQGWLEIANPLGRTNGKTKSPRIKVPIIIPYHFYHQITNVVMGKQIGVNPKGKPIIEHQKYSVEIIRKQNEFYVNIAFDETEIGRVLDFKETPQSDVIAGIDVNPDRIAVSLCTKQGNFKGSKIFYLHNLNAFSTNKRATIIGQIVQQIKTWLLENNVGGIVLEDLKFQQSHDTDTYSNRNFHQFTYKKMLNSLIRMSLRNGFSVKTVNPAYTSVIGKLKYSKNFGISVHEAAAFAIARRGLELQEQVPQEIILLLKNQITTKLRILVASMEESKKNTQKVYKKWLQTIQTWKEYHNWKLWSILHKTVYMSNQQFVFKI

SEQ ID NO: 1813 - protein, 522 aa, synthetic construct
  REGION 1..522: note = Synthetic
MKTTRSCKIKTITREQREQLLDLIRTFESAKRYSFNRLTEGHHDKELIKKLQHVYSLNKRYCEDAVLQAQTIISSQKELLPVYLENNQKKLEQTIQKIEEYESGRKRPKKVSLDVCLNGLRKRKQKLEQKVAMYETHITNGTLPPVIFGGRRAFYERMKQNISNQEWKDLRTRQLYSRGDKSKKGNLNIRITMDDNGQGWLEIANPLGLTLGKRTSPRIVVPITIPYRYYKEITDVVMGTQTGVNPKGNPMIDHQAYSVELLRKKDEFYVNITFEETETGRMLDFKEVPISDVIAGIDVNPDRIAVSLCTKQGNFKGSKIFYLHNLDTFSTDKRATVIGQMTQQIKDWLFSQHVGAIVLEDLHFQQSHDTDKYSNRKFHQFTYKKMLSSLIRMGLRNGFSVKMVNPAYTSVIGKLKYSKKYGISVHETAAFTIARRGLGLQEKLPKEMISLLQNQIATKLRILIASLEESNKNTKKIYKKWLQTIATWEDHHNWKLWSILHKTVYMSNQQILFQIKKGGKLV

SEQ ID NO: 1814 - protein, 526 aa, synthetic construct
  REGION 1..526: note = Synthetic
MKVTKICLIDDENAEELEKLNRLMAIFCAAWRYSFNRLLEGEQSGRLIKSVSALFHLNKRYAEDAVMQAQAIISSQKELLPLRIEGIQGKIKKTCKKIEDYQSGRKRPKKVPLEICLKGLSARLEKLQIKKSILLKQQNDQTIPTVIFGGKRNFYERLKGNISRDEWRDLRSNTLYSRGDKSKKGNLNTRIVFDDEEQQFYLEVANPLQVEGRKKSPRLRLKLLIPDKFFNEIVEIVFPNEVGVTSKKKTLEEYSPYSIELKRKNNKVYVHITYGEVVHGSIRNGNEIILSDLVAGIDVNIDRIAVSILTKQGNLLESKTFYCHEMEYVKSNRRSNISGEIAKDIIQYLLNWNVGAMVIEDITLKQDHDTNKRFNRLVHSFAKTKIQKSIISRGIKFGFKIKKVNPAYTSVIGRFKYSKKYGLSVHEAAAFVIGRRGLGFDERIPQEILNQVRTLVKPKLISILGSMEESEKRSKNGKHRRKYMGMLLRNIETFKENHSWKLWNVIHQTLIIKNQELQFKEVKSWY

SEQ ID NO: 1815 - protein, 513 aa, synthetic construct
  REGION 1..513: note = Synthetic
MQYTVRASIETICNNARLDGICRTFSSMVRAAYNRLLEGKRTNEIVRLLQMQYGIENWRWCQWAIAQAQAIIKSQKELLPLYVEMYEEKIVRVKRRMARVADPLKKAGFRARIEKLEKHRGEVEKHIAAGTAPRAVFGSRKLFEELAKGKGSREGWRFRRSSQFFSVGQANQKGNANTRIVRRGDGYTLEVRNWPGGDFEVGLRVPEYYQRLLATAVVSGVAYSVRVKRIEQNYQALISFEVDEAPSQPSDGRRVAAVDTNPEGLAVTVLTPDGNLFASRWFQESALVHARTEKRSWLAANLVKRAFKWIKGYGCNAVVIEKLRFGMTQEGNHRANRICSNFLRKKLVELIKLRALKLDWICVEISSSYSSLGSELKYGKQFSRFNRHQLAAFVLGRRALGFGEKLSTEQLEQIPKGKRASARRIISSFHGHRHELLMPRSGTDGRMSGGDVKGASAFDERLTAHTAVTSLPRLSLVLGGGCRGDEPRARGHGVNPPPAIGVKLGNVNKVNVI

SEQ ID NO: 1816 - protein, 421 aa, synthetic construct
  REGION 1..421: note = Synthetic
LKKHGYEMRIAKLEKRKTTFQTHLKNGTLPKVVFGGRKHIGSEKWRMKRRGQLVSVGDGWNKGNLHTRIRKIDGGFMLDIRSWGANHESFMVPLHVPETYLRIFDAIADQTLPPVHPIKAKNPTRPYTIRLVKRLDGNYDCYVSFEVSDEPIKPWSGKRLASMDVNPTHIDLAIVNSDGNLVAAKSFKEPALVYAHREKRLWLASNLLEKAFKWASFFKVDVLVIEDLNGFKGIEHGGANRVIANFMRKKLITLAATKALRREWILARIPAAYTSRVAKTKYKPNFPRMSVHQLAALVLGRRALGLQEHLNPDQLKAVAGRIRKRQAWVKKILLQDHGHPCLKPSISTDGRMNMQDAKGVEPLIERLTVHTRYAAKERMQRVSWLMPVKHTPWRVEATRYDGWARAHRGTAPSPLYVEMSI

SEQ ID NO: 1817 - protein, 503 aa, synthetic construct
  REGION 1..503: note = Synthetic
MPSEEELMKLNNLSRIFPSMVRFAYNRLLEGCREYEVVERLYELFMPNARWCQWAIKEAKALMEAQKLLLSLYIEDLKWRIERAEKRLGKTRNPLKKSGIIRKIERLKKRLNELREYSENKTMPKVVFGGRRTLKKLSKGRKVIKEEWLARRRWGFLSIGQKNQGGNANTRIVKCRDEYFLEIRNTVFNDFCVALFIPEELRHYVEEVLERRLAYTIRVKRTLYNGYQVFITFELEEEKVCWNGLKVAGFDVNPLGIAVTIVSRDGNLIASKWFLYSDLVFARGEKRDWLIGNLVKKAFKWIRGHGVNAIAVEDLRIKHNPDFPNWVNRLIANFVRKKLDQTIKARALKEKLLVVEIQPAYTSKVAELKYAKMFSRFNAHQLAAFVIARRALGYGERLKEPIKIKHRLPNRKKTCDIKVLYVWPSIYGHSSQRLMGAGSSDGRIELALKACESYDWQVSPRSRTTSDSSNEEVRYTGGCLGDELRARGHRGSPPLSDSLTSIA

SEQ ID NO: 1818 - protein, 297 aa, synthetic construct
  REGION 1..297: note = Synthetic
PARLTPFGSWKDDRFDCFISFPLKSDPLPVPDKSQALAGIGLNPNVVAVTVALPNGNFKVSRCFWSPDLVHASHEKREWIAGNLAGEVADWLASLGVRQVALEELSFAQDHDTNKVFNRITHNFTKKLLFTRLIVALRKRGIAVFPVPAAYTSLIGFFKYAETYGLNAHQAAALVIEALIQKLLGCPPAEGWTHGKLWGKHYGCLRRPERKLPVPSTSRVSWKPFSPNRVKIFPLGSLPLSACARRRKASEGRKTPGSGSATANPTGFRRVFSARGCRAGQTAAEPGRGSSTRPPTA

SEQ ID NO: 1819 - protein, 486 aa, synthetic construct
  REGION 1..486: note = Synthetic
ADMITVPGRIYPDEAARERLISFMRRFQAAKRTAYQALRRGKEPEEIVKDLYRKFFPNARWCQWALEDAKATCDAQKEQVRMHVSDLEAKIEKSEEKLKRTKNKLHRQGILARLSLLRARLEYWKGFLERDEVPPAVFGGKKNLLLLQEGKLSKEKWRELRSNAFYSVGQANQKGLEGQYGNANTEIVYDEATDSFRLNIYIPPEPGDKSGRLRQDEDWVSVPLEVPARYRPLLLKYLVEGRAYTVRVVRKAGRFDCFTSFSLQDEAEVDRTSPMAGMDLNPDVVAVTVVLPDGNFKVSRCFWCHDLVHASHEKREWIAGNLAKEVADWLESLGVKQVALEELSFAQDHDTNRAFNRITHNFCKKLLFNRIVVALRKRGIAVFTVPAHFTSLIGFFKYSETYGLNTHQAAALVVARRALGFKEKVPKALVQKLLGRSPMEGWTKSMLWGRLSGMFKATRKKVSRYFNAKALTWRRPCSGSVPCSPS

SEQ ID NO: 1820 - protein, 609 aa, synthetic construct
  REGION 1..609: note = Synthetic
SVRLTFQGKLLEVAKEDRVKIDDLMKRFQSAKRTAFKRLVEGGKKSKEIEKELVEKFILNTVYSRSAISDAEAIIDSQRELLPFYIANYEGKIRKSKKKLEKCRSELKRKSIFSRIKKYEGKKDRLKQHLENGTMPKVIFGRRNNFELLINGGITREEWRDLRTNQVYSKGCAFMKGNQNLRVTYEEDEKQFYLWINYPSSEKGKRGKKQKYALFIPDPFKPYILPCLETVRKRFGKRKEVVIAAKKPHTVRMIRRKGEYYVYITVEVSCPGEIVSNACEKGLLGLDVNTKGIGAVIVLPNGNLRAHRWFPCHELFYARSEKRSHLVGNLLVKVFRWAKRFGVNTVVSEGLNRFKKDHDTNAKYNRATHNFCKEKLLKTVKSRAVKENFVHIEVFPAYSSIIGEIKYRKMYGLSAHEAAAFVIGRRGLGYNKENIPKELKKSLKPEGRRRWKDDADPLASICHLWGGLWKNVSKIKNTFFETTKEIPLNFRGFFRHLLIKASGADSALQLALSYIVKKGETEVEDITELLSGFRSYLDNLISSVLENAEELCESRSTSRKQQLCGVVDFINIREFSNFKGLRFEESSLKGSKSLKRLVEAFGGVFELRG

SEQ ID NO: 1821 - protein, 534 aa, synthetic construct
  REGION 1..534: note = Synthetic
VQFTFEYGELFGLSLEDEQSIDWLMERYCSGKRTALNRLLEGASVKKAVHQLEGLSRLALNWRYCEHAARDAQAELKSQHKLILLYLTDVNDKVGDLEKRLAKASRRPKKLESQLEKLKKKRGILQKLATGDTTLKVVFGSRKLFVRRAGGKTSLQEWRRARNSQVYSIGQANQHGNANIRIDSDRVGINIPQQAEPRRAKGRTYRVKNVRRWFNLRVNEKFRVTMDQLQTSGRAYSVRMIKEKGRFLVRVSFEIDLPQLNHVPERVCSIDSNPCGFAVALVSRDGNLFAHRFFRNDRLIYASANKRNDAVGKLVAEIMVWASGLGAEAFAIEKLDMRNRRDFGHRANRVIYAFVRKKFAETLTMQCWKKQLPVITVNPAYTSKIGNLKYRKQYGLSIHEAAAFCIGRRAYGHSEKLEDPIEITVKNEGVKHKVSVLYVWASIYGHGFSVDPRMEPPCRKGSMETKLNSQDTAVFTGHPASALTPLSLCGCDWVRKGREPSENLEATGNGVKPALPTYGGGDASATPSHINNDT

SEQ ID NO: 1822 - protein, 491 aa, synthetic construct
  REGION 1..491: note = Synthetic
SVMLTYPGVVSEITETNSFILDELMRRFQSAKRYSRERIFEGSDRKQTVEKTKPLFLNNVRYMRDAFLEAEGGISSQKELLPLYITQYNRKIEKLKQKIEQLSRSKKKNKDELILFKQQKIERLEKEVRYYQHHIDNDTVPKAVDGSKQKMRLLNKGKITKIEWRESRSNNIYSRGEASKGGNENIKLFYITENLFEIKMLNPLSDKKGDRLSFFVRFPNKFVVKIASYLATKQAYTVRILRRKGKYEVKLTLDEKLNTIPSFQKGIAGLDINPNNLSITIVYPNGNFRVSKVFWMHDLNTVSANKRDWIVQNTVIEMIQWIKTFDIDSLSIEALKFLQNNVDKSFNRISNNFSYSSITNAIISTCFKENIALIEVDPYYSSFIGKVKYQKTYGLSVHQSAAFVIARRGLGFEENVPKELLSVLFTKEVKKGQRVYKLFTHWKKAKQWHDDIIKEMKKMKIKTKNHFISDVISFVRFQIKDIDTEGIEFPF

SEQ ID NO: 1823 - protein, 480 aa, synthetic construct
  REGION 1..480: note = Synthetic
MQLTLRGALIELEEEDRTQIDDLMRIYQSAKRYSFNRLLEKQNLNDLKKDVMAKFGLNARYSYAAIVDAKATIESQKELVRDEIAETKEKIKKSKRKLKKVKNLLKRKGVLMRIDKLNNKLKKYEHYRDTKTIPKIIFGGRKNFMKLQEGEITEEEWKDLRSNAFYSIGGRIDGGNQNLRVTHMNDNYFRLRINAGERRWIYLVLWVPDRYVDPLRRVIDREYSVRVIRKDKDKYEVHISSDHPETDLDFSHGVAGFDINTDNLSVTIASKDGNFRASKVFPCPELCYARSNRREWLLGNLVKDAFGWLKQFNVKTIAIEDLKFRKTHDTNKKYNRKTSNFIHSKATELIKSQAIKEEIGIKEVNPKFSSFIGEYKYSSTYGLSVHQSAAFVIARRAMGYMERVPKQLIMFINFVKKRDPLVKPMEGFRKWGLLYGVMKRAANSRIRKVLHAFSSSLGLDDAETANSVLHGAIPCPTRRS

SEQ ID NO: 1824 - protein, 409 aa, synthetic construct
  REGION 1..409: note = Synthetic
MKAILINETEEQKQIINSMMLVFCTAIRFSFKRLLENKRNALLSKLDKRQRKANYFKKFIDTNTVPPVTFGTKEMFIRRCKGLISKEEWTDCRNNRFYSRGDKSKNGNPNLRVIIKNEISYLEISTFEKTSTNRAIKIQVPIYLPQKLSKKTGKVNGINYKEIFLSHLASGETYQVKILKRNNKYYCHITFEMLKKEIIYTWHNGIIGIDTNPDGFALTMIDNKGNYKWHTYLKQHELSYARANRRENLCGELAKQVILIAKIYNCGIAIEDLKFKNDKDIHGKFARIKYQFIYCKLLTMLESACIREGIEIIKVKPQFTSKIGLYKYCHQYGMVVHNGASMVIARRSYNFKERVPKILKDKLVKDLDRFNKKNEWSKWNEINKNLKRKVGERPDLWLVNRKKILGVVS

SEQ ID NO: 1825 - protein, 508 aa, synthetic construct
  REGION 1..508: note = Synthetic
MKLTSRCLLFNISDEHFQIVTNMMRHFCPAKHFAYKRLEENISNNEFKIHNLDASVSKLYNLNSRQAKDSIEQARQTIISQVKLLDLRIAEYEGKVESVLRIFKKGVTPKQRIGLISKLDKRLRKLCGYLNHKRNGTLPSVIFGSKENFYKRCKNQITKEEYQQRRNNQFVAHGDKSKKGNPNLRIIIKDELSFLEITTLESTSSQPRLKPDGTMTKSKATYKKILTPLYIPQKLSKKTGKINGFNYKAALLTQVLKEAPYQVELLLKDGKIYAHVTFDIDEAEITCTGHNNTIGVDTNPDGLALTMIDNTGNYKWHYYLKNAELLTAKGNRRNNLCGEMIKTLILIAKSYGCAVSIEDLKFINDRDVHSKIARKTAQFCYRILLNMIESACLKNGIELIKVKPQYTSKIGLYKYCQQFGLDVHNGVAMVIARRSYGFKEKIPRLYTKLYKSIPVIKKGELTYENISYSNEWSNWANVSKIMEMVLRKDCYPRFFIENRKDIKNFILA

SEQ ID NO: 1826 - protein, 483 aa, synthetic construct
  REGION 1..483: note = Synthetic
AIKTTVKGVLINISNEYLDEISELMTVFSSAKRFAFKRLNEGKIKKGELEKLIAHKYGINIRQSKDAAQAARQMIASQKSLIKDYYENYARKVKAIEKQLEKAKSQKKTHALTKKLEKRKKKQEFYKNHIDNDTIPKIIFGGRNNFIRRCKGLISNEEWKSLRDNNYYSRGDKTKKGNPNLRIVITNNMAFLEISTLEKNENNKAVKIRVPLYLPQKLSKKTGKINGRNYRQIISDYLLTGEAYQVELIKKDDKIYCHITIDESKIREYKEEFNLFNGVIGVDTNPDGLALTRLDKDGNYKWSVYLKESELLYARTDRRENLCGELIRNVVNIAKSEQCAIAFEDLKFKNDKDVKSKFARTKHQFIYGKLLSMLDTRAIRENIQRFKVKPQFTSKIGLYKYCHQYGLDVHNGAALVIARRAFGFNEKIPKVLKTKLLEKSELEKFNKQVNWKKWSIINQRIKKKGGEYPSLWLKHRKLLLNIS

SEQ ID NO: 1827 - protein, 274 aa, synthetic construct
  REGION 1..274: note = Synthetic
VPIYIPQKLSKKTGKINGRNYRRMLLDYVGKELPYQCEIIRRNGRYYCNITMEEAGPEKIFTCHNGVIGIDTNPDGIALTEVAADGNFKGSIWIGNGELTTARTEKKTNIIGEVVREALEQAKKSGKGIAVEDLKFADDKDVKSKFARVRHQFIYKKLILAIIRLAIREGVEVLTVRPQYTSTIGQYKYMHMFGLTVHQSAAYVIGRRALGYRDKVPRMLIDHLDDKSKQKFATKINEWSKWLAVRNYYKKKGGEYPGLWQSKRKEILGLGIPF

SEQ ID NO: 1828 - protein, 471 aa, synthetic construct
  REGION 1..471: note = Synthetic
MKTTVNAVIINLSPGQEFLLDRLQTLFSSAIRFAYQRLLEGVVKKDIQKLIQEKYGLNSRYASDAIEQSRQLKLSQERLLNMHIENWQTKVKAVKKKIARTKQPEQISGLQSKLAKREKKLAYWMKYRDTGTLPKVIFGGKKNFIARCQGKISCEEWKSLRDNRLVSRGDVTKKGNPNTRLVVEDGKACLIINTDQYEAHGKVKRYVQIKVEIYLPYKPSKKTGLINGRNYRQMVLDYIHTNQAYQVEIIHKNSQYYCHITIEEPEPEVVINRYSGLEGIDTNPDGLALTRISKDGNFKESCWLGNGELCNASSKRRKHIIGQIVKQAVAKAKEHGVAIVIEDLKFKDNRDVRAKTARKIHQFSYASLLEGLEREAIREGVEIIKVNPAYSSIIGRYKYQKQFGLTVHQAAAMVIARRGYRYKEILPKAVRKILPKKTKDTNRHHWSKWYVANKTVLKLRKVGEKPAFSVV

SEQ ID NO: 1829 - protein, 489 aa, synthetic construct
  REGION 1..489: note = Synthetic
VKTTVRGVILQLTEVQKTFLDTKMNRYCAAVRWSFKRLLEGCKTQDIRLAAQSNFSLNSRQANDAVYDAQTTIKSQEELVKLNHTGAANKVEFTQKRLEKAMPSGKRAKLRRRLDKEERKLVFWQKHIDAGTFPPVVFGGKKLFHKRCKGNITREEWQEARSNRYLSRGDKTKGGNLNTRLYIKDGNIYMDIAAEPVETGKVIRYNRVTVPIYLAHKPSKKTGLINGRNYRRMVLEYLKTGGAYQVEIIRENGRYYVYVTIEEEVPVPYTAYNGAVGVDTNPDGLGITHADYLGQFKEGLWPSQGEWTYARSKRRDNLIGEAAALVADMAKRLNCALAVEDLAFKNDKSVTAKFNRMSHGFVWSKFLQAVERRAAREEVPLAKAPPPFTSVIGILKYQQQYGLSNHEAAAYVIARRSLGFSNEKAPEQLVQKYVKKRNTFALLTNWKQWSSVKKAVIAAIKKQTKREVKSLVSWQHHRKQLIARVTPLP

SEQ ID NO: 1830 - protein, 276 aa, synthetic construct
  REGION 1..276: note = Synthetic
VPIYLAQKPSKKTGKINGINYRQMVLDYLKTGSAYQVEILRRDGKYYVHVSIEEEAPMPYNHKGAFGVDTNPDGLGVTQVECLGQYRGSEWLGQGEWTYARTNRRDNQTCEMAKKVILRAKEKGYALAVEDLKFKNDKSVTAKFNRMNHSFVWSKFLKAVDRSAAREEVPILKVKPAFTSVIGILKYQHMYGIAVHEAAGYVKAQRGLGFDHEKIPKILLDKLVKKKPEFKQMANWKQWSAVKKSVLAKIKKITKRKKVNSLVSWQIHRKNVLGIG

SEQ ID NO: 1831 - protein, 507 aa, synthetic construct
  REGION 1..507: note = Synthetic
RMKTTIFGVLLEVTPDQDTVLRRLMRKYGFMLRFAFQRLVGGLQNIGGLERHCASETELPLRYAKDAVQEAQDLIRARHQAMKDGATLWTQRVKKTRERLTALRASPHPNARRIAGQERKLTHQEAQQAFYQQHVEAGTFPPVVFGTKKRWWDRFKTLDDPIAEQARQQAWREEWDESRNGRLSARGDRTKRGNPLLRVCAGADHWILEISLDCRKPGKPDAKVPRYEKLAIPLYIARKVSKKTGQVNGRDYEGLLRRVLASDDPYQVEILRRQGRYQVRITVEEVPAPIQTDPRHGWVGVDTNSTFLALCHVLPNGNPHAFATIGDPRLFDVRSTQRDALVGGLAVETVQWAQARGAGLVVEDLQFIHDRDVSAKFNRVTHQFNYRALLMAVERQAAREGVGLRKVTPAYTSIIGRFKYQPQYGISVHHAAALVIGRRGGLKVRRENVPKALRLWMQDRDQWNDPTYRKNDWSAWARIKRIMTKTLASHHQYLSAWLGYRKTLFSK

SEQ ID NO: 1832 - protein, 533 aa, synthetic construct
  REGION 1..533: note = Synthetic
ERKTTIFGVLINMTEQMKQEVNQCMFDYSFMFRFSFKRLVEIEREHELDEDRKKAIQQLEKDVSSRTGYPIRVAKDAVADANELLTARHTLMVEYHELWKERYENTKAKYERFKQNPNVNHRSFHMLGLQNKMERQLKQIQFYEQHILQHTFPSIVFGGRKNFEELQKGNLSKEKWNELRNGRMSSRGDATKGGNPNLRVLETEEGFALQMISNRKVINGKKFYYEKTLIPLYIATKCSKKTRKLNGRKYPEVMKRALESGKAYQVEILKRDGQYHVRITVSEEKPIVQEKINGYLAVDTNIDGLALCLMNEKGFPTKFTWLGEGGLQYYPTHKRENVIWELAHQVVWPCVEQKLALVMEDLAFIHSKDVSKKVRRKSHQFCYRKLLECMETLCIRYGVKQVQVKPQFTSVIGRLKYQTRFRVNVHSAAALVIGRRAIPGLRETVPKKLLCVLTKKQLETFHEQNEWKQWSTMQKQATKLLKKQGAAFYQWHDYKKRVYQTLVTPKARKTKSSNKKRETKASFDTIIVHPIAE

SEQ ID NO: 1833 - protein, 553 aa, synthetic construct
  REGION 1..553: note = Synthetic
NGSINYTVCGEWFPETYPTFRAQKWSRGNEDPLTTEMRLFCSCQRWAFNRLLEKSTREDLKKQGQQIFGINSRITDDAVLKAKSILTSRQELLHLEIKETETKLVRTSKKLSWAQKDMDKAIKRNDPAKIEKTKRIVHGRKARVKKITNKLNELKTHQENGTIPKVIFGGRFLWKRVCKGRASNEEWRQVRQNRLYSRGDETKGGNPNLKISYHNGEFTLSVTISHLSEQTGIDSKERPIMTKAPRVTGKLWLSEKHRLKVWELLLSGAPYTVELIKGKDSRYRAHIAFITQIPEIATNPNRGCLGMDTNPDGVALANVSYFGQPEPWPEGFTIPYPKALHKFDREFRVTVHPNGFLYIKIPELSYSSSYRRTYLIGVLSKVVTDIAKSLGKPIALENLNFNKDRLDTNKGFNRMASSFPFKKMIEAVIRKAIKEGVGVKPVWPAHTSTIGYHKYMQRYGILVHHAAALVIARRAIGYKECITKELKQKIQAIKEKLKVNSLPGEGKGMTQTAKRLFKQLDRKIPIHNGLTRFKQESFYSVWHDLKQLVLLSR

SEQ ID NO: 1834 - protein, 379 aa, synthetic construct
  REGION 1..379: note = Synthetic
VCRGRVSREEWRQARQDRLYARGDETKGGNPNLKISWHNGEFTLSVTISHLSEQKGTDKKGRPIMTRAPRVTGKLWLPEKHRQKVLELLLSGVPYTVELIKGRDSRYRVHITFAVTAPVLVTNPNQGYLGVDTNPDGAALANVSYTGQPTPWPEGFTIPYPKALHKFAGEFQITMHPNGFLYIKVPELSYSRGFRRTYLIGVLAKVVVDTAKTLGKPIALESLDFGKDRFDTNRKFNRMAANFPFKKMVEAVTRKAFKEGVGVKQVWPAHTSTIGYYKYMERYGITIHHAAALVIARRAIGFRERITKELKQKVQAVKEKLSQKVNSLPGEGRGMTRKVKQLFKRLDGKISVHNGLTRYKQESFHSVWHDLKHLALSSR

SEQ ID NO: 1835 - protein, 468 aa, synthetic construct
  REGION 1..468: note = Synthetic
MRHILHGEMYVEAFEEIKALFEHFNSCKRFCFVRAGRDGIKDPRSVATKRYGSTLNSRWISDAACEAKALVERLKETPETKVIFGGRDAWNSYKNGTLSKDAWLALRSRNIYSRGDKTKKGNPNLRIDGSTLRITLSVGSTKKYKTYPFHISNRKRPTKASDTQNDYLSDYEKLDALLRSGMHYNVRLSRKDDDPKHLRVTIDYETDDTPATYGFENGVLGIDANPDRMALALVDAAGNLVENHVLINNRLLYGSSHKRLHDLGLLVKQIILIAKTHRVGIVFENLKFSKDLSAYPKKLRRIFSNFVWKKFLEILERACQKNLIPYERVNPAYTSYIGRLKYQEMHRITIHEAAAYVIGRRGLGFNESLSVFGFPRKPVKQLLLRTLEGKYQEKRIHSWRLWKALKDNETAVLTELRDCKLSGLKEFDGYLRGKSRDVGVNPTGKTSTTTGRRGEVAKATLVGEERRP

SEQ ID NO: 1836 - protein, 492 aa, synthetic construct
  REGION 1..492: note = Synthetic
MIRVIHGEIWSEDFTQLDSLIRDFQSCVRFCYCRFDKDKLDFNDVRKAAKLKYPTLNTRQVSDAVLQGQTQLKVFQVQLEELAERKEKIEAKLKKKLWKKTRQKLEIKLRRIAKKLYNPKLVFGGRKAWEDLKAGVITKEEWTNKRDNQIYARGDATKDGNLNIRIVGNTLRITVGTRKWATHKLFVSNKFQDELKQMMASGCAYNIRLVRKDDQHFKVIIDYQVDESERATGVGFENGVIGVDTNPDRIAFANVSADGNLVEAKTFINTRILYGNTNKRDYDIGCLVKKVINYAKEQDKGIVFENLEFKKDKSGSRQWKRMQSNFVWRKFLTLLERKCIEHGIQYKKVNPAFTSIIGKYKYRWMHKVSIHESAAYVIGRRCLGYNEKLSFYKQNTGRVKAEVIKTLAGKYEGKRVHSWVMWKHLNDNVEAVLTGLQVRLADLKEFVGNIWYRGETLRGEIFLQELIVGSNCDNNSGVRKDTLQSGKILQLC

SEQ ID NO: 1837 - protein, 301 aa, synthetic construct
  REGION 1..301: note = Synthetic
LTPEKFQLQLADLLASGEAYNIRLKKQDEKHWQVFIDYEVETPIARIGFVGGAIGVDTNVDRIAIAEIAKDGNYIDSQTLVESRLQHGGTEKRLYDIACLVKQVIQIAKDKKKGIVFENLQFKKEWTWSKKNNRVKANFVWRKFLELLERKCVEYGIAYKKVNPAYTSIIGKVKYKEMYGVTTHEAAAFVIARRGLGFNEKVSVRNCEAKRVKRKIIRTLGEKYDGKKVHSWVLWSKIKAVLTGLRKSMCDLEELRDHFRDDSEILSGEVFLSELVRGSDCANNFGSGRTTLRSGKILQLC

SEQ ID NO: 1838 - protein, 438 aa, synthetic construct
  REGION 1..438: note = Synthetic
MIRVIHAQIYSKDFSPLDSLARDYSSCVRFSYSRFKKDSMEFSDVRRLAKAMYPRLNTRQISDAAMEAQGIHRRNGDGKVVFGGRKLAKTMKSGESTSKAWKDARDCRMYSRGDTTKSGNPNLRVVGDSLRVTVGNRKFEAYKMFVPRKYRTSLKRLLDSGTAYNVRIMKQDDNHWRVAIDYETTVPATTVNFDDGAIGVDTNPDRIAVAEVSSDGNYISSETFVNSRLKDGSTHKRMYDVGVMAKDVVAMAKQSNKGVIIENLEFKNKFGSNRKFNRMKSNFLWRKFTEILERRCLESGIACRRVNPAYTSVIGRCKYAPMYKTAVHEAAAFAIARRGLGFGEKISVNGCPSGLVKQKIMGTLEEKYHGRKVHSWVLWGKLKAALTGPGKRMRSLQELRDHFLYDGGSPSGEAFLQELVAGSDDNNHSGGRKAALQG

SEQ ID NO: 1839 - protein, 467 aa, synthetic construct
  REGION 1..467: note = Synthetic
MRQVIHGEIYVEDSTKLDGLCQMFQHIRRYGYNRHQKNDVQGSIRTHCEQKFQGQLNKRWIRDAELSGNSLHTRFKDEKVIFGGRDNWKQLKTGNLSKQDWLSARDHHCYARGEANKQGNLNCKILGNQLRVNFGTRDYQYYPLHVSTKVTKKMAKQGRPSDKEKLRLLLLLAQQKKFSYNIRLRKKDANHYKVNIEYDLPDPEAKVTFANGAIGVDTNTDHIAIAETDAKGNLVNVESFDSQRIQFAKKDKRFYDIAIIVNQIIDYAKKTGKGIVFEGLGKFKKKKGSKKQNRKRSNFCFRKFLNLLEAKCIQYGIAYRPVKAAYTSIIGNLKYAKMYKITGHQAAAYVIARRGLGYKEKISLYKQNKVFVKAYLIRTLETSSKSGKYKGKRWSNWKLWSRLNKEQAVLTGPQSRLQMPFRELCGSRSSTTLEWEKSQANPSLEQVEKVTSRNISSEGRKALFQSR

SEQ ID NO: 1840 - protein, 434 aa, synthetic construct
  REGION 1..434: note = Synthetic
YMRKVIHGEIYSSDFDNLNKLVSDWSSACRFAFCRFQKDKLSFNKARNQTKIKYQSLNTRQISDAVKQAQGLYSRVKDKKVIFGGKKNWDKLIKKELSNQEWKNKRDNQIYARGDVTKKGNPNIRLLDKNGDFYLRVTIGNRQFEEYNLFIPTKFEEQLLSLFGSGNPYNVRLLKKDTHHYRVVIDYEIEAPETMVDFSNGVIGIDVNPYRIAISNINKDGNLVKSFNIVNNRMFFASTNKRKYEIGCVVKQLTKYALESQKGIVFEDLKFEKEFENRGRKFNKVKSNFVWKKLLTLLKHKCVENGIMYKKVNPAFTSVIGKLKYQKMYSLSIHESASYVIGRRGLGFNERLSLYKYPHEKVKELVFDHVGDKTKRVHSWSLWRKLRDNYKAVLTGLQSRMFSLKELNGNLCYVGENPTGEVLFQELVGRGINF

SEQ ID NO: 1841 - protein, 433 aa, synthetic construct
  REGION 1..433: note = Synthetic
MRKIIHGEIYSLDFDKLNQLVSDWSSAYRFAFCRFQKDNLSLGECRNKTKIKYPSLNTRQISDAIMQAQGLYKRVKDKKVVFGGKKNQDKLVKKEISNQEWKDKRDNRVYARGDITKKGNPNIRLLNRNGDFYLRVTVGNRKFEEYKLFVPNKFQERLLSLFGEEKPYNVRLLKKDKQHYRIVIDYEIENPNIIIDFSSGVIGVDVNPDRVAISNISPDGNLIKSFSIFNNRVFFSSTNKRNYDVGCVVKQIINYALENNKGMVFENLKFKKEFENQGRKFNRIKSNFVWKKILTLLERKCVENGIQYKKVNPAFTSVIGKFKYQKMYNLSIHESASYVVARRGLVFNEKLSLYKYPSKLVKEIVFDHAGDKVKRIHSWSLWRKLRDNYKASLTAIQSRMSNLKELDGNLCYECGIPSGEIFQKELVSGSLNV

SEQ ID NO: 1842 - protein, 426 aa, synthetic construct
  REGION 1..426: note = Synthetic
MRYAYNQFYKYYKLHHGELNYTDEVRQTAKNMYPELNARQSSDAVMVGQSIYTRFKDQKIIFGTKKTFYKRKNKSITHEQYVAERDDQIYSRGDKDRSGNPNIRVVNDTIRVTCGTREYEYYKLFIPLKYRKRFEELLISHQSYNVRLIRKDSTHFKVIIDYETTDIPIKIDFSNGVIGVDINPDRIALCEISNTGNYIRSFTDIDNRLLYASKNKKQYVMGCMIKKIIKYAQTTNRGIVFEDLKFEQKYNRHETKWNKIKSNFSWKQMLELLERKCIEYGIQYKKINPAFTSIIGKNKYQRLYNIPVHESAAYVIGRRGLGLKERLSIYGYNQSEVRRIILGTLAGKYKRKRLTNWALWGAVERHKAVLPGLLVDIDDLEELSDDILVHERDSHELNLTEKTGHGKSLKVECRDKKVFRLKTELK

SEQ ID NO: 1843 - protein, 404 aa, synthetic construct
  REGION 1..404: note = Synthetic
MRKVVHGEVWFDEETKVQIFHFMKLQCSAMRTAYNHKTLPVKDLRDLITHKYPELLDGLRRDAILKAEMLNQDNACFGSKHLFKTRSTNLISKQEFNLRRNNQLYCRGDKSRQGNRNIRFKQDNTIITLNLAKKTSFTGKAYFPPKFRNFDKTCYDARLIYDLDKDQFRIILSYKTETILPIYKTETILTIITSPQNGVLGVDMNPDCVAVAELDYNGNIKKHLNLNAQRLPFARADKRQSDINLLAKLIVDLALETVKPIVIESLFFDTKRTKARPLYKKFNRMRHNFTYRKLSNAVLSRAYKNQVKVFEVNPAYTSLLGIINYQEKYSLNRHTASAVAIGRRGMGFKERLTASTTPITKLPKSYFNKRKNKPVPTTGIIIASSTQEHFLTEKSYNWIKTFIK

SEQ ID NO: 1844 - protein, 478 aa, synthetic construct
  REGION 1..478: note = Synthetic
MRTVVHGEVWFPPEAARRVEELMRLQCSATRSAYQAVHKHGLSGNDVCIYVKRNYMAGLNQRYINDACAVASGIRQDHALFGGRRAWERLRTGALSKAEWRDARNASLYSRGDRATSGNPNIRIAGDRLLINDPREYGRWIDGRLFVPEKWREGLSKAPFYDVRIIRRKNGRFTVAASWEAAPPPVVTDRSRGALGVDANPDMVAVADVSADGNPLWHRSIGSQRLPFASAAKRDNDVRLLAKEVVNEAARLGKPIALERLKFPAGSRQAGWRKFRRAKSNFVWRKILDAVTSRAERSGVEVIPVNPAFTSDLGELKYASMYSMNRHAAAALVIGRRGAGFLERQSFTVTPDASESNRVNLEGGSRSLYLTPKAYSWMRERFLHPKPADLTGPGPAPGSRPGIRPGIVSDPSGPKPSLGLGPSAGGTPAGEPGARTGRPRGWVTPFQGAERHPLEPVDFYKLPKPGTTARPRTEQGGD

SEQ ID NO: 1845 - protein, 455 aa, synthetic construct
  REGION 1..455: note = Synthetic
MIKVIHGEAYFKPEDKQIILDLMKSQCSAMRSSYQAIHKHRLDLNNIRKYVKNNYSRFLNARYIYDAVMLAFSNPHEKVLFGGKRLWKKLQTGSITKQDWIQIRNNQLYSRGESNKDHFGNANIQCQKYDILKVNDPSQRGKWIQGKLFIPDKFKDFDHTCYTVRLIYKNDKFQTKISYEIDDPEIITAKTNGMIGIDTNPDGVALSETDQHGNLLKHFYIRKQRIQYAQKDKRDYDTRLLAKEVVDYAKSVGKDITLEKLKFKTNDKNKKKSKTKKAKKFNRMKSNFKHRGIIISIIARSKKDGVQTHLKNPAFTSVLGNLKYRKMYSLNSHTAAALVIARRGQGVKEKLNFKINKVKSRKTKKSKTISEKGPKFNLEGRGFKTVITHKSMNYLMLLGKSILATLTASGLVPDQLSGIGPSTGETPVSESYSITGRVGVDFLDKNQPGIRKSSF

SEQ ID NO: 1846 - protein, 437 aa, synthetic construct
  REGION 1..437: note = Synthetic
TIRQIAHGTAWFKDDSRIVELMKFQCSATRSAYQAIHKHNIKENDIKIYVKKNYMKDLNQRYIADACSSAKGIIHESSLFGGKKLWDRLIKKHISKDEWQQIRNNHLYSRGDKTKNGNPNIRIIGNKIFVNDTSKRGLWIEGKIWIPKKFKLNLECYDVRLIKKNNKYEVRISWEENIPKKIEFQEGMIGIDCNPDGIAVSETDSSGNLLNHFYLKNTRIKDARKEKRDYDIFKMAKEVVNYAIEKKKRISLEKLSFKKENKYRKFNRMSNNFAYRKLLEAIYRRAIKNGIEVINIIPAFTSTLGRLKYQKMYSLDRHSSAALVIARRAQEFKERKDFKVKKDEKKKDVFNLEGRGISIALTQKAWSWLQKDFLKPNTTILTGSNLAADLEESVIRFSMSENLIGESISITGRYGELGNSSLMDNNKSNLLEDGMLP

SEQ ID NO: 1847 - protein, 388 aa, synthetic construct
  REGION 1..388: note = Synthetic
SMRVVAHGLVYFKDPSAICRIKKLMTHWGSCKRSAYQAIHKMGLKGNDIKIYCKNNYMSLLNGRYVSDAVTEASKINQEHALFGGKKLWNRFIKGSISKKKWLHDRNNTLYSRGEKSHKGNPNIRVVGNQLWINDPVSGWLKGKLWLNKPVNLICYESRIQLKNGKFHVTFSWEEPDPPKITDISKGVIGVDTNPNGEALTEINSTGNIQSHIFLKNERIQFSSTGKRDYDIKQMAVKTVSIALQARKPIVLEQLNFKNKKMGKKFNRMSHNFIYGKMIEAIKSCALKNGVEIIEVPAAYTSIVGKLKYQDMYSLSVHNAAALVIGRLGFLNLSDKVVIDVSGSEERPKLEARGQSVTLKKKSFLWFKSKFRICQKQPALTGPCLVPG

SEQ ID NO: 1848 - protein, 411 aa, synthetic construct
  REGION 1..411: note = Synthetic
MHIIIPGIVHQGNSTALKQLMRDWSSCARYAYQRIHRDGLTGNAIKIACKPIYMEKLNQRYIADAVLKAQAIKKDHVIFGGKKRWRDLLSGLLPKKEWQEFRDSELYSRGDRTKKGNPNIRVLNTPEGYKLRIGLPGPREFLMFDLYIPEGRKNNKKDYKELLDLYRDCYDVRIKNKAGKFHVSIGIEIPDVKPIYLCSNGVIGIDTNPDGLALVEIEKDGNLIKHEFLKCSRLQFAQHDKRKNDIETLALQVVNKAIQGNKGIVVEDLKFNDGKRGSRKFNRMRHNFIYSQLLLAIERRAIKDGVELRKINPAFTSIAGILKYQGQYSLNRHTAAAFVIGRRGMGFMEQIKVRLELGENKKLNLEGRGFKIALTVKAYSYFRHLYRVVEMKMPAVTPPCLTPQLGNYGTG

SEQ ID NO: 1849 - protein, 439 aa, synthetic construct
  REGION 1..439: note = Synthetic
MPITIQGTIHNLSDKNKLQQLMQDFCSAKRFSYCRFKEEKELNNVRYLTKIKYSYLNSTYMNNAVDEGKALFTRFKEQKIIFGSKKLWKRLIDKEISKENWSQKRNDEIYSRGDKRKNGNLNTRIYLENNKLKLRINCGIRDYIYADVWLPPKYYSIILDIIQLENPCYSVRIKQEQKQCRIIISYDEQYPEIEHPLAHGAIGIDLNPNLIAMAYIQPDGNLVETKSIINNRINNARWGKRHYDIWMIAKEIVEYAINKNCGIVLEDLDFKKNKKYKHTNDKYNKKKNRALGNFTWRQLLIAIEAKAHRNGIEVKKVNPAWTSVIGRLKYCDDIKVHEAAAYVTGRRGLGYKERIPDWLRSMIAETLQEEGIKKSNWKIWSDLKKLTVPDCRAFVPQRVRRRVKDPPSGLMDESKDLSSPELLGFTGRDVSEETSEITW

SEQ ID NO: 1850 - protein, 331 aa, synthetic construct
  REGION 1..331: note = Synthetic
YAYARICDSIPILDIEKDVMQKFDLNSRWAKDVVMRAKAAYDGAEKLVETGRLESPRKLIWGGRKNFECRSKGEITNGEWRRIRSNQFWSRGDKSKNGNLNLRIEPAEDNYQLRITIGTRQWEYCQLWIPEKFRAMLNAHLNTEPCYTVRVKRGKDDRYSVFITFDAELPTQSVGFKEGAIGIDLNPSGQAWAEVNVHGQLLGKGWINTPELQYARRGRRDWLIGQIAHQIVGLARSEGKGLVLEWLKFKRGENHGRKLNRIFNNFTHNRLIEAIVREAKQQGIAIKQVNPAFSSVIGRMKYQEVYPHLAVHEAAAYTYWAAEPYALLTCR

SEQ ID NO: 1851 - protein, 461 aa, synthetic construct
  REGION 1..461: note = Synthetic
MQVTVRGELFPSDSEAEQLDELMRIQSSCMRYAYNRLCEGKTKSVIEADLKDTFSEINSRYRRGGYFRARANYESAKELVKSGEQESPEKVVFGGREDLKKRERGEISNKDWKRIRNSQLYSRGDKSKGGNLNLRFVERDDQPYLRVNTGNREWIYVPAYLPDHVSEPLSGEEPYGVRILRENGGYELRVSFEENHEPEIGFEKGHVGVDFNQDTIDLAATGEHGQFKGKKTIECSGLTSARRGKREWLIGNYAKEVVDYAKYWNRGITIEKLEDVARGRPNQHEFVHAKFLEAVRRRAEREGVKVREVNPAYTSVIGRWKYSSSHHITSHQASALVIARRGKGIHEKLRGLKTLAFEAMEAGEGEEGVPDRRVHSWSLWSLIGDLPSRKGAEHTDPEPRPRRPPGRVSHRESRGMESPGASAPTSCGPSRATERSSDRGDPPEGKTVIPGGGPPAREATA

SEQ ID NO: 1852 - protein, 566 aa, synthetic construct
  REGION 1..566: note = Synthetic
LPKVTIQTTIPEIEVNTKGLEYLDEYNTLFGQAIRKGFSLRNQIGQTTKKESSLEKLICKELETEFGLSNSEAKNAYNKASSVYSSQAELVDTYIDDNYHRIKGIRKSIGKLKGKIRKASEMGYTLTVKSLTRKIHFKSQHINQLLAKIERLKESKELGKLTVNFGSSKLFKAQYNLEENGYSSHEEWLEDWRKTRSGRSFFVGSKNFLSGNQLVRYNPELETLTITVSPCRQTKYGTHVVLHEIKFQRESQWLTDAIKPTVIKSTRKGLDGEKKETARQGSEQPVTYEIVDKDGRFYVNATVNVQPAKKESSLANGALGVDFNPGSIDWTVVDRHGNLLRHGSIKINVQDKRSNQTKDVIGKAVAQIVRIASNHGVPLSIENLDFAKKKASMKEKGAKYARMLSNMAYSQFNQMIETRCSRFGVELILVDPAYTSIIGVTKYLKMYALSSGCAAALVIARRAQGRVEKVPKSLRSYFRKPEDMLRSGAWSKVAKKSNTIGGFHRNKFYFLGSNKKVPTNCRMHGTLRQTSTSRSRRYGIVQVLMAPHIRQKPRALGFPPLKHINA

SEQ ID NO: 1853 - protein, 392 aa, synthetic construct
  REGION 1..392: note = Synthetic
QVYDNYSAIQGIKRSIKKLEAKRKKAEKNNNIQYCHRFKRSINFKRNKIQHLESVIIKLKIDREQGKYHVAFGTKKLFGAQFRLEKNGYADHRDWLSDWRSARSHIIYYEGAAAFATGNQLVRYDIETQTLTITVSPCFKQKYGEKVVMRSVNFPHGLDWLKSAIVPVIKTVTRKDKKGNVRKESRTASLQPVTYRFVIRSGKYYLNATIDAPKKPNITSLEKGALGIDFNPASVDWAVIDRHGNLKRHGSIKINVQDKRSNQTEDIIGKACAELVRLAEFYQVPIVIEDLDFEKKKASMKEKGAKYARMLSNMPYSKFNEMLERRCNKFGIELLKVDASYTSVIGVTKYTAMYSLNSGCAAALVIARRGQNRTEKRTQRTMQLSLRNQRIA

SEQ ID NO: 1854 - protein, 274 aa, synthetic construct
  REGION 1..274: note = Synthetic
RKENGIWYVNAIIDQPVGEVITSRENGVLGIDFNPSSIDWSIVDPHGNLKRHGSLQVNIQDKSTHQTQDILGKAIVQIVNEAKVNQVPIAIEDLDFTQKKAALKERSPKSARMLSNFAYSKFTQMIETRCIRQGLSLIKVNAAYTSIIGVTKYMAMYGLNSGCSAAIVIARRGQGRTEKLPKQNAIYFKKPEDCLKSNVWSRVGRKINICGGFNRHKFYFPSHKQVPTNCRMHGKLRQTPRPKWRRNTVQVLRTPHIKLKTSAVGSPPYLTTYG

SEQ ID NO: 1855 - protein, 551 aa, synthetic construct
  REGION 1..551: note = Synthetic
MPSFTTQTNLPAADTQFIEFLEAMAVKFGVVERTSFAAINQGQKVDTAFENELQQSSGFSSQDVRNAITKADANYKSQKELVGNYIKETSNAITAIKAAIKKLEKKVSILQKQGRKNQDLLKGIPSLEFKLHQKKRNLHNKVARLKELKATERSGHFSVTFGSKKLFRAQYNLDENGYRNHEEWLEDWRYHRSNHIFYVGANRFASGNLLCRLTSEGQLTITVPPCLQSQFGTHVTCTSVLFRYGQEYINAALTTKRFENTNKKTGKVSCRIGTVAPLTHLLIKKDDQWYIHTTVELPEVPYQSHRKNGVLGVDLNPASADWAVCDTEGNLKASGTLRLNIQDKSREATKDALGKLCAELVRLAESFEVPISIEKLDFTKKKASLGECSAKYSRMLSNFAYSSFTQMLEARCQKFGIQLIKVDPAYSSVQGLTKFVAMYGLNSGTAAALVLARRALRKSERLPRVLHVTLKKPVDSFRHVWGAWSVVARVLDSCGGETALQEGFPPQATANPKGRARHRFYTQRGEANSLLEVTLASLRAGKQGSATSKSG

SEQ ID NO: 1856 - protein, 512 aa, synthetic construct
  REGION 1..512: note = Synthetic
MPTYITLLPESIYSFLDTTSELYSAVEKDMHVALMRGEKISAIEKSLQSKYQIDSTTTRNVDHDLKGKHKGITKLRNSQAKNLKSTIRGIQSAIQKRLKKKVVTRKDRFVVHQKRRRLAIKQQKLDKLLNGRLSLCFGTKKLFHTQFNLKENGYSSHDEWLVDWRAARQSNFMMVGAKTYASGNQLCRLTSDGELKITVPICLVKEFSSHVSCDGVKFRYGQTFIDIALTPTRHKRGSNYRNGTERAVTHRFVKRSGRWYLHTTVELPDIPWVSHKQNGAIGVDLNVDSVAWTHCDQEGNLVSHGQVAIDLKDKSSGQTTHLLSQAIGQVVDIAVEKQCPIVIEKLDFSSKKNTLREHGKRYAKMLSQFAYAKFADLVQSKGRLKAIQVISVNPAYSSLIGMIKYMSLYGLNSGTAASLVLARRSFRLSERMPRVLYALLSPVDDNKHIWSYWARISKLVKGCRRHSYFKMKVRVGVKLNNQSSEMKSKLSGKSKDTPLIPSTASALGCMSD

SEQ ID NO: 1857 - protein, 558 aa, synthetic construct
  REGION 1..558: note = Synthetic
DGTRTPQLRVGIEARIDYHPFLDDWGDRYQSIMRTALNALLQGQSEDNIEKSFQSRFDIDWAWADSIATDAKGIFDSLIEARALKIKALNDDLVAGWKSVATTIELMSQQLANPTRKNMKGFAKRLMGTKSKFNRLERKQVEKNELEQATRLHICFGGAKLFNAQYHLEENGYSSHNEWRVDWEKKRGGNFYSVGKGSVLGNNPVAKIFYIDDDIFSVTFTVPRYLRGDYGDTVSVEFEVTGQRKHNLLYALESDKPVTVQCFRREHKNDQWYIHLTTYVQDVPTISSRNNGCIGIDLNAETIDVIYIKRDGNPERCRNALSFPIPTGTTGTKVARLRDIVCEIVKLAEFYQCPIACENLDFSTKKNQLRHSVSKEYNRMLTGFIYDKFRSYLVVRAEKYGIEILFKSPFMTSVIGMVKYMAKYGLNSASSAAMVIARRAMGFKEFIPQKWLKTLSSFFEPEDSKDGGFAGGWRRISAWLKTFCIRRPQLFQLDTVLRFLLDSLVTQSQKKTHKRRKPGGSSKSGGKRTGRAKPTEGQVPLEREEVVVTNIGAVTVAP

SEQ ID NO: 1858 - protein, 353 aa, synthetic construct
  REGION 1..353: note = Synthetic
VGKGSVNGNNPVTKIHHKQDDIFSVTITVPRCYQEIYGQKITLEFEITKQRKHDLLYALESNKPVTVQIFRREHKDNQWYIHLSTYVQAVPYISHKRNGCLGIDLNAESIDLVYVKKDGNLHHTDGKKTLFSWEIPTGTTGQVEAKLRDIVAEIVRIGESYQCPIACEDLDFSKKKATLRHSSKKYNRMLSGFIYDKFRAFLVARAEKYGIEVIFKNPFATSVIGMVKYMAKYGLNSAYAAAMVIARRALGFSERIPRSKEPIIGICISSPEDKEVQSWGQWGKICKLLREQKLSRHQMFESAKVLEALHDAVSRTRMGKSPPRQGRKVKSASKPVVFSNSKIQGESPMPQNC

SEQ ID NO: 1859 - protein, 523 aa, synthetic construct
  REGION 1..523: note = Synthetic
RFMVGIETKIKSSDQKILDFLEEWGALYQKIVRWSTTRLLQGKTKNELLPTVQSTFNIDWAWADSILTDAVGIISSAEELRKLNIENIETDIKSGMEKVEEMISEYNKFVLSNDQNAAKIQAFKINNKLARLERRTDKLVKLRNSKLSITFGTKELARKQHFLSENNFSSHSEWLAEWRLARSGNFSSVGNANSTGKNRVMKTFYKQDNIFILKITVPKCLTKKYFQELSLEFIVPERRLPDLLYAVNPKNLLSSESSQPITVRCFRREHKNNAWYLHFSTYVPEVPTLTQNNGTLGIDLNAKTIDVVYVSVDGNIKKSLVKSFSIPVGTTGQVNAQLGNIVKDIVDVAFQIGCSISIENLDFKDKKAALRHSGSKKYNQMLSGFVYSKFKEFLVVCSEKKGIRVNLTNPALTSTIGLFKYTKLYGLSSGFAAALVIGRRALGFNEALNADSKILLSSFGFKEIIPRAKSKNWKLWNKVHKKMKESKIRRNRFYEQNISKIIITEINNLKNQSKKSKKSKKYA

SEQ ID NO: 1860 - protein, 185 aa, synthetic construct
  REGION 1..185: note = Synthetic
MQKPITTQVFRREHKDNTWYVHLTTYASDIPIVHSKKNGCIGIDFNQDHISITHVKRDGNISYIQEMPKKWKGLSTGQRQARMRDIVVEVVTLAESLNCAIAIESLDFSKKKASMSEESKLYNEMLSNLSTSLFRTTLESRCRRFGVELIKVNPAFTSVIGMIKFMLKYGLNSGTSAAWQLPVEP

SEQ ID NO: 1861 - protein, 542 aa, synthetic construct
  REGION 1..542: note = Synthetic
RHGSQVGIESKIEYHATLEILGEKYESWRRTALSWLQLGLTEDEVEKRLQSTFDIDWAWADSIATEAKQCLDQLATAKELNIARIKEQIKKKLKRAKDTLKALEKQLATAKKKGFANQQESDKFAKTLLGLKSKTLKIESLKRDVTSLESKSRLHICFGSRKLFKAQHHLEENGYDSHQEWKTDWRKKRSGRFYCVGKSQLGGGTMMKVFPLDDNGKYRLNIRIPRCLRDELGEYLDLTFEVSDRDGRTRKGDLNYALLMQKPITTQVFRREHKDETWYVHLTTYVPEVPLAHTLENGCIGIDFNKDHISIAYVKRDGNIGYVQEMPLVWKGLSTGQRQARMRDIVVEVVTLAESLNCAIAIESLDFSKKKASMSEESKLYNEMLSNLSTGLFRTSLESRCRRFGVELIKVNPAFTSVIGMIKFMALYGLNSGTSAAMVIARRAMNLSEKIPQGLATPEDEAKPVWSAWNRVARYLKLHRISRTRLFRWTKALEGILTSPPSGTEHQPSSPVSLETGELPNPRQSPKGEVRPNGNVQLCLDF

SEQ ID NO: 1862 - protein, 488 aa, synthetic construct
  REGION 1..488: note = Synthetic
QFTTQMKIDSCHKEFLEASTQYTGTLRARLLTSLLKKESGTELKKKYIAEYGVTARQFNSLISEVRGIISSAEELRKRNIEEAKIRIASCKKRIKTLEKKLKDCSPACGINGNRSPRKSVKFAIHQKKRRQGILEARLKKLQTKVSICLGGKKLFKAQYNLEANGYESHQEWLEDFRRKRNNRVFYIGSKDESFGNQNCQLIGNKLLIRVLPHLQAGYGDCYTIANISFAYGKEEVTQAIAKKQAINYRLIYKKKNWYLQLTTQREDAPQITRKELGVIGVDLNPSHLSWAEVNRHGNLIAFGNIPTPLQDRRSDQVKATLGDAIKEIVEYAKKVQKPIVVEELDFSKKKARLREYSVRYRRMLSYFAYSLFFLMLISKALRAGVQVITTNPAYSSLIGKFKFMSMYGLCTHLAASLVLARRAFGFSERLPAKYALGLAEHKYRHVWSFWRAFSKAVSNREPRVGLVSRQPGANPSSLSSTPGLTCDS

SEQ ID NO: 1863 - protein, 585 aa, synthetic construct
  REGION 1..585: note = Synthetic
PISFTAGTLLPDMSFPGSRPFTLHEFCTDMGKFYGRIKRTLFKEAQSTGRPAMSFKNKYLKAFGITARQFNAIRIDLQGNIDSALEIQDGRIEDLSDGIKSVRKWLKAKEAKISKVQADKKLSNSARHDILQPLRFVVHNKKRRLAIMGAKLAALKQDKKKKRVRICFGSKSLFHKQFELTENGYAFHEEWFKDWQATRDAIFFFVGSHEETGGNQTCTLTADSKLRVRVPDALIEKYGRHVIIPAVHYPYGQEIIDTALIIKQALTHRFLCKDGKWYLHTTVALPCKPKVTHHPRNIGCIAIDVNEKEIAVAETDRFGNYVWSRTYPAYVKDLSTDQTEALYGDLCKAIIARCVAKGKPLAHERLDFQKKKSTLREQGVRYSRMLSQFAYATFLNTLDRRAFKSGVIVYTDNPAYTSVIGKVNFMGRYGITSHEAAAIVIARRIQRYSETPIKEAWNLPMRAEIKNKKHIKTESPASTNSTSPVPGRKRGKHVWSFWIRLKVGGACDNLNVLYRVRRPSQSSTSCATSSTLITPAGAVLSDTDCPVDSTASGVTPNIANHGACVESGRASPTSVGDNTVRSPHF

SEQ ID NO: 1864 - protein, 506 aa, synthetic construct
  REGION 1..506: note = Synthetic
LATYQTRIDDRESYPFFEAVGEYFGRLERKLYVDCHIKGLQVKELKRRYIAEHGITARQFNSLVKDLTALLDSVRESLRWRERDLLGRIESVERAIKKKEKEREKLLKSLSGMVPRSEKWQKKVKRLKWVRFVLHQKRRRLRNLRHKLEAVRRDLESGLCRICFGGRELFKAQHNLEANGFRDHAEWLLAWREARSGNFLVLGSEDETCGNQTCTYARDNTLRIRVPDRFREQFGRHILLRDVVFPYGQEHLDRAKEPVCVVKGRKIYRAVTYRFVRRDGTWYLFATVERDDPAPSTSRWNGAVGIDLNDGFIQAGEVDRFGNPVNEIKVPVAMRDRSRGQIAAALGKAIKEVVLYAKEKGKPVAIEDLDFSAKKQTLRESGSRYARMLSGFVYGKFRAMVESCCSREGVELLKPKGRHVDPFATSAIGQLKFMARYGLSPHGAAACVIARRGLGLGLERAPEVAVLRMPPRGRTPRRSYWRRVCRALKRGPAFGVRVDVLYADGF

SEQ ID NO: 1865 - protein, 514 aa, synthetic construct
  REGION 1..514: note = Synthetic
ELLQTYQTKLSNIQLNHHLDSYRYLDEFGKFFGFLERKLFVLFYVKKQSVSSVKPSFCKEYGITSRQFNALRMQLEGKLSAVKRVRKYQIEQLKHRIMELERIIEKKIKQKEKQYTKLMETKETDSCFQKIVKRYRNIKFVLHQKKRKLRNLKQKLEQLQQDERNNIIRICFGSKRLFHKQFHLEKNGYSSHEEWKRDWQRARSSQFVVIGSKDETFGNQSAIYNTKNELHLRVAHQFVDTYGKYIVFPSVMFPYGQRVLNQAKIPYMGITKGGKPKKYFRAITYRFLRKEKGWYLFATVERDVPEISTTDLGGYIGIDLNAGFLSVCEVDRFGNPLQEQKIRVSMYDRNKNQIFASLSNALQQVMKYALSVGKHVAIEDLYFFKKRAVLGEMNSKYARMLSGFTYSKFKSLVESKAKKLGVGVKLVYPYYTSQIGHMKFMARYGLSPHGSAACVIARRALRFSLEKPKYDTVLQLPKTLDKHQSNYSKWRSITNSVKKNYWFHDKIEILKADI

SEQ ID NO: 1866 - protein, 307 aa, synthetic construct
  REGION 1..307: note = Synthetic
MALGSKDETFGNQTAAYDLENNLRLRIAHSFEDIFGKYLAFPNVVFPYGQAHLDQAKVVYKGFTKSGKEKRYFRAITYRFIKKEEHWYVYATVEIDIPEVTTTNLNGSIGIDFNAGFLSICEIDRFGNPLKEWTIKVPMYDRKSEQVKVSLGDAIKDIVEYAQKVGKPTVFEALDFTKKKQQLGEVSRKYARMLSGFGYSNFKEMLQSKSKREGVQTVPVNPAFTSQIGHMKFMGRYGLSSHGSAACMIARKGSKFRWEKPNYTTVLGLPKTFDKEKPNKSNWFSLSPYTKNKFYFNDKIELLKADC

SEQ ID NO: 1867 - protein, 516 aa, synthetic construct
  REGION 1..516: note = Synthetic
FRTYQTKLKNGMIVLLDYSEIPVYVYFQQYAKEFGRIERRLFVDVYVRKKPTNQLKVEYCANYQLTARQYNSIKNQLDGRVSSKKEVTKLHIEETKEKIYQTRKFLTKKIAQKEKSQNTLVKMRGDEPSFLKKVNSYRKLKMAIHQKKRKLHRLQVKMERLECDEKCGVVRLCFGSKKLFHKQFHLAENDLSFEQWKNNWEKARASQFTFIGSKDETYGNQSCTYDLENQLRIRVNRKNEGKFGKYIVLSNIHFTYGQENIDKAKVPTIGYTKGKGNKVRYYRALTCKFIFKNRHWYLNMSVDVDTPEIKTLQNHGQIGVDFNASFLAVTDVDRFGNHVHSFQVPFKAYHVSTQQAKQSLSDALKRVVDYAVVKQKPIAHEKLDFKKKKQQLKQLSNRQAKMLSGFAYSSYQSMLTSKCRKYGIAVVAVNPAYTSQIGQHKFMKKYGLSSHGSAAMVIARRGLELKKTEQVPTNRLIQGNQDSIMLKKRFEQWKELSKQWKSYTFGQKIELLYHVF

SEQ ID NO: 1868 - protein, 516 aa, synthetic construct
  REGION 1..516: note = Synthetic
KTYQTKLCRTVEYPTNNLLFAYLDEWSMYFQSIERKLYVDMVHKKASVSKLKNQYLKKYGITARQFNSIRAQLQGKISSVRELKKAELQTKTAKLKSLEDGMPVLLSDKKSYVYLIENTKMNDKNFQRLVKRYKKLKHKIHHTKRKIQSLKHDLVMLKSDMDKDIVRICFGSRALFNTQFNLEQNGFNNHAEWKEKWVHARSNQSMCLGSADENFGNQNCQYDKDNNLTVRVADRFEGVYGKYIVATNVKFKYGQTNIDHCKDTYEGYTKGGNPHKYHNGAMTHRFYRNEFGWYLYTSVEVEDAPVITDRRVGGIGTDFNVNFAQICFVDRFGNPLDELRIKYSMYGKTTDQIDAMLGDMSRDFCELGKYYKVPVFIENLGLENAKKASDNGPKYNRMINSFPYKKFRDALESRGRKTGVEIVAVNPSYTSVIGQFKFMKKYGLSSHGSAACVIARRGLKLKTERLSKKNKNYILNSDVNADMNKNNYRLWTKLSSSIKNKYNFNDRINMLYAGVL

SEQ ID NO: 1869 - protein, 643 aa, synthetic construct
  REGION 1..643: note = Synthetic
LDLRIYQTITIITDVGSGLNDQRKGLVKLMELAKKGELTDLAIRYKDRLTRFGFNYLSVFFESYGVTIHILDEKSEDKIIYEELTEDLLSVVTSFSGKLYGIRSGKNKLLKEKIKGVVEDVANLSDPKTLSSHGLTFLQIKHQETHYLDKMAAFSGMIERKLFVDSFIKGKTRAECKRVYTKKYGITARQFNAIYIQLNGKMQSIIELHKVHLTELRDKIKSLEKFIAQQIEKAVRLHAKITRLEKKFPFSVNFKKTVKQYRNIKFLLHQKKRKLALCKKNLERFGYDAQNNRLRICFGSKKLFQKQFNLEENGYQSHEAWKRDWLKARSAQFFCIGSKDETAGNQTCTYSSSSNELRLRVADNFLREYGHYIIYKDISFPYGQEVIDHALKTYRGTTSGGKPANYVNSAISYRFTKNERGWYINAAVELDTPDITTTILVGSLGVDLNVGFMSLCEVDRFGNPLYEETIPLRMYNRSSDQITAALGDGVKAIVDKAMKTQKPMVIEVLDFSKKKSMLGEESKKYSRMLSGFAYSKFKEMLKSRATKYGVEVIEVTAAYTSVIGQMNFMKRYGLSSHGSAACVIARRGLGLTIEKPKYDSILGNYTDTMNHRPLKSRWSSISYRIKKNYRYFNERIELLKLEA

SEQ ID NO: 1870 - protein, 594 aa, synthetic construct
  REGION 1..594: note = Synthetic
YETLVLSADGFPDGVSVDSLLSEVAELEARCAHAYFVARHVKGMAWGALKRDMPKRFGLTNRQFSSVGYVVDGMAKGIAEGMETRRDMLAGRIKSAETEIGKLQKKCKASVEKDKKHREWRAKSKSVELEEERPPKLRKLPKALKGFRPDHAAADRRDWRFRIHQKKRYVGKLKNDLVALDADIKVEKVRLCFGGRKSFRAQYAPNADQAKWLAEWRRVRASSIFCIGSRDETYGSQTASWLGDGGLRLRIPPALEAKYGKHVVLRLKGFRRPGASAEIDRIAALASLREDGNMFLAPDLAKKLDGTLKLLPGAQALSWRLVRRKAKRGDVWVAMASFEQAPAEIVTDSRDGAWGLDFNPDLVAMARIDWRGNIVQRATFPLDLKDKTNDQIKAILGDAAAWAVELAEGYRVPLVAEKLDFSAKKATLRERGARYAAMLSSFAYATFQALTDRRAAARGVAVRRVNPAFTTIIGVAKFGVGYALTSHHAAACAIARRGLGYSERIARRIARRGENTGQSKVGSTIAVSRSTFPLPVRTRGKHVWSDWRRFAKQQGQVRRKAYTLVDEADGRWKKRRSDPVGYGGGNRPAVSRRR

SEQ ID NO: 1871 - protein, 509 aa, synthetic construct
  REGION 1..509: note = Synthetic
QALSPLFSSIADLYAQAEHALYVDHYVRGRPETECKREYLGRFRLTARQFNAVAVNLRGKVEAAKEAQKLHIEQLKGAIAAAEKAVKKAERGLSQLGKRAVKKSSVAKGGAHDAEISEGKRRLRFKIHHKKRRLTALRLRLAAAETDRKAGRVRLCFGGKRRFRAQFHLQKNGYASLAEWRQELQRARSSQFLCLGSKDETSGNQTCTRMPDGNLRLRVPPALEGQYGSHVEILGIVFPYGQGEIDAALLRQEAVTYRFLRRRRHNGQKEQWYIQATVDRLDVETTTLRHLGALGVDFNPAHVNVAEIDRFGNVVGSRSFQVDLSKHSEAQMTAALSEVVADMVDWAQKAGKPIAVEHLDFGKKKSALREKSPRYARMLSGFAYGKFHSLLRARAGREGVEIIGVNPAFTSVIGAVKFAPGYGLSSHCAAAVAIARRGLRFGERLRSRSAFPLPARNRGKHVWSDWRRLSQRLRADSARGRRPSEGDRRRGTPLSSATPSQAPAGQGPP

SEQ ID NO: 1872 - protein, 598 aa, synthetic construct
  REGION 1..598: note = Synthetic
RLRGKDPGGRLRFEIHHKKRRLAGLGAKLEMAEGSLKRAVPRICFGSNRLFRRQFHLKENGYRTHEEWLSDWWGARSSQFLCLGSKDEKCGNQTCALLPDGTLRLRVPDALANNPGGKWVLISGVRFRYGRDVVDRALAEGQALTHRFLRRERKGKPVWYVQVTVERQDAPLLTSRLLGALGADLNPGLVAAARIDRYGNPVAWRHIPVQTRGRRQEQVMASLGEAAADLVAWAKAEGVPIVVERLDFEKKKAGLKEMGKRYAGMLSAFSYSEFFALLLSRAAREGVEVILVNPALTSVIGQVKFGPGYGLSPHAAAAAAIASGQTGGAYPRGCVPKAHVVGVLPREGGAGGYPYPGRHLRLPVGRTARLEMVLPRFRGVIHRRQLSGKLFARRPEHCAGDQAHGEKGYPRGGPFCRLPDPHARSPLAHGERHHHRGGGPRHRLRGCRPTGVDRSGWPSGARPHARRRFPADQPQGARTGSHHRLQSRRDHQHPQTRHQAHRRGPHPRRVGRIPPGGRQTAENRAHRVGTPGPLARACGGRPLHGHRSPVCAAARPGGALAAPGHGCPLPVLGAPRRGTASTGQHARAASRWRTGQFA

SEQ ID NO: 1873 - protein, 542 aa, synthetic construct
  REGION 1..542: note = Synthetic
TVEARIEGARFVPVLAAIAALWGPLERLLFQKLHAGGSQSPAERVKAVKREFIADHRLSARQFNGMRMNLEGKVDAWRETQKERKAQLAEAIRKLGKRIGKLAATRAALTRAIAAFKPSRTLATPQAFKDRRARVDFQVHQKKRRLETLAARLRQVEARMAGTPSICFGGRALFRKQFHLEANGFASHGEWRESWRERRTSQFYAVGSGDEKRGNGECQFDPDQGVLRLRLPHALEARFGTHLTVPVDFSRHSDLRDALAKGRAISYRFLRRENGQWYVQATTTRDPVPFVTRRERGAIAADLNAGHIAVADLDRFGNLAGHREIPLDGRGLSSEQAGARIGDAVASLVLQAKEAGKPLVIEALDFRKKKCALRELGKRTAAMLSGLVFAKFQETVQSRCEREGVELIRVNPAFTSTLGFAKFGGYEISTHVAAAMAIGRRGLGFGELLKARTASPRLGAALNERLREIAKGRKAGEHVWKAWKELTPWLRAEMRKRRRPRSVPSGGASHPGRGSPQPVTVRSSRRFGVRTPAVLAVGAAAP

SEQ ID NO: 1874 - protein, 542 aa, synthetic construct
  REGION 1..542: note = Synthetic
TITIETRIADDPAILPVLESCAALFSRLERLLFVALYARGETLNAAKRRFLTEHCITARHFNAIYKQLSAKVESWREVRKLNLATVSKQIVKTQKAIAKAKAPFVKHQKKRRLQKLRDRKAGIERDLAAPVPSVCFGSRKLFGQQHELAANGYADHAAWQKAWRASRSSSFFVLGSADETAGNQTCQYRDGALHLRLPDALGGETLVVPVAFRYRVADLLAALTPTKQTVTRGPRKGKAVTRHSAVSYRFLRRDNGHWYAQAMFEVAAAPITTSGRKGCAGIDTNPWGLAVTRCDRCGNPVDTLDIPWAVEGRSADQAKASIGDAVAVAVLYAEKHGVPVAVETLDFDDKKNEDRGARCNRMLSAFAYAAFAQMLRGRCAREGVELVEVNPAFTSVIGAAKFAAGYGLSVHRAAALAIARRALNFGEVLRTRHTGSALALPARNRTRHVWSDWRRWAKARRPQRKAPTKPKGSRGSKPPNGRQMPIPCHPTTAQVGGRAGRATPRRNAVPVECGATPQANGRHRCSDGLVSVNSHAPKCAVR

SEQ ID NO: 1875 - protein, 500 aa, synthetic construct
  REGION 1..500: note = Synthetic
HTRLRLDEETARLLDDYALRFGRDLRRLHALLGQGVSLKDAKKQFVREGLTARQFNGIAATLKGMKESRAKSYQLEIKSKAPRARAIEKKLALDASRGGYSPRVRHQKKRVVGRLRDFLKHAPDREPRLIFGGKQLWHAQHHLKENGFATHDEWRNAWRESRSGEFFLIGSKDESSGNQSCRVDLHHETLTVRLPDALGGLRVIPGVRFPYGKEVLEQALQRQIAISYRFVRKKKGWYVFASTKARRGERLTDRSRGVLGVDLGPGGMAAVETDRIGNPIARKTYPLALYHKTSSQARALIGDVAAEIGDWAKRCGKPLAIEKLDFEEKKGLLRERGKGYARMLSSFAYRTMAKALESRCAREGVEVIRLHPAHTSTIGIVKFAAMYGLSGDEAAALALARRAQDLKESLPAGTAPGRPEDRSGHVWNHWKRLGKALRHLGRHAFLAARRRSGRAREYPALSARTSPAQRRRHARGHPLDHRVGIPEPIPGSTVRPGCME

SEQ ID NO: 1876 - protein, 532 aa, synthetic construct
  REGION 1..532: note = Synthetic
VTTKIMDDSLSPYLEKRSILHQKVLRRLFVAIYIKGEAPNDAYNRLAKQYGIFAAEINSIRKETEAIYQSWKELLATRISDQQGKINKLEAKLKRPKIEPSKAHQWRRKLHRYRCKLLVLKSEQASGTPKICFGSKELFYRQFRLEENGYKTHTQWLQDWRTARGDSFYLAGRASEKSGNNACILEVLESDNDSVTGVLSLRKKNDEIKGPKAKAGDFIPILVRFTHNSKYILQALAEKRPITYRFAQVKNWKVHVMVDLPTVPIITDVRNGSIGTDQNPFCIVWSVIKPDGNCSDTYSAKLTQGHRTAKQAEHELSNIVCDLVDTAVLTKRPIIIEKLDFAQIQRELRSRGLNRQLSRFKHSLFVKLLRGRAAKLGVEVIEVNPAFSSIIGWLKFGYGYGFNRHQAASIAIGRRVLRPNGKSFSERLRVRETPGHPAASKLSRNTSAKPVRKRSEHAWTGWRRLGKQLAREPSRPKSAGTRKPPAVSCHETGRQGSNPYPLGQSTPKATDAFQNGSTDPLANRRGTVYAPA

SEQ ID NO: 1877 - protein, 348 aa, synthetic construct
  REGION 1..348: note = Synthetic
VFVFLTGILKLRKKNNEIKGPKAKPGDYIPIQVKFTYNSKYILQALTEKKPITYRFTQDRKGWKVQVMVDLPTIPIISDVRNGTIGVDQNPLCIVWSLIKPDGNCSDTYGSRLTQGHRTAKQAEHELSNVVCDLVDRAVLTKRPLVIERLDFAQIQKELKSRGLNQQLSRFKHFLFAKLLYGRATKLGVEVIEVNPAFSSLIGWLKFGYGYGFNRHQAASIAIGRRVIRPSGTSFSERLRVRLTPGHPAASKLSRNTSAKPVRKRSEHAWTGWRRLGKLWAREPSKSRSAGVRKPPAVSCQETGRQGVNPYPLGPSQQMLATPKAMEAFQNGSTDPLANRRGTVYAPA

SEQ ID NO: 1878 - protein, 544 aa, synthetic construct
  REGION 1..544: note = Synthetic
VLTIEAAILDRGVCGYLSARAAEYQCLLHRLHVEVNGRGKPVADVVKAMLRTEGWTARQLNALRIQLEGMARAWKEGLERRIKGLSDRIGKLEEVISKESDKNARHQRQRKRAKWKKKLSQWQGQLESGKPNFCFGGRKLFKAQYHLKENGYRDHEAWLMDWRSVRSDSFMLIGKAADANGCSDCRLEVVQASTESLAVMLRLRKLNREMPPGRARPQDYIHIPVVFRYNIPQILAAIAAEQPMNYQFFRRDGEWRVHLITRIPDVQRVSDLSNGSLGIDLNPECIATAQVKADGNPSQLVSYDLLPGSRTANQTKDELGKIVAQVVDRAVAAEVPIVIERLEFRQIQKELQARGLNRRLSRFKFSLFETMLRTRAAKQGIQVFSVNPAYSSIIGYFKFGYGNGLNRHESAAIAIARRIQRPGGGHFSERIRFRTQHPEAPDPKTLLPPATDGNRHPWKGWRKLGNLLAKSTRSGKSGDEPCPAGGGFREEDDLDYSPSVTTVPESDKPRLLQPQPAKRSDRVIRTVCDSSATGFDPGSSTVTE

SEQ ID NO: 1879 - protein, 490 aa, synthetic construct
  REGION 1..490: note = Synthetic
TLRTSFKEDANPVAYSLIDMSAWCVGDVVGDAFKKLYVTKEPEKVVKGWLHREGFSHRQAHGIIVEIKSRINSQAELQKADIVKCERKIRDFNKQLKSKTPVMPVKWLENQIAKWTRRKAKVEANLARDIPSFCFGSKKLFRQQHHLEENGLTFEQWQEAWSQHRHEQLLCVGSIGENRGNSECQVIEHHVEGTVKNPELHCVVQLKLPPCVCDSWVDIPLVFKYGADKLEPILQALETANDHCLAWRFIINRERRTVWAHVSFTELTLPARTVPDAVLGVDMNEDFLEASVVSRKTGNRIWFWRDEFKGKSAQETRDNLCKILGNYMALCQAMNWAFAYERLDFEGKKAKFLGARMNRMLSEWLTGHYSETIERNAARCGVLAVSVNPAFTSVIGDLKFSTGYGWSRHQGAAVAIARRAMGYSERARSVKPEATAELAKIRKPHVWGVWARAKPAARVGKSGKVVVPAAKAGSPKGMVAACGPSPPLGA

SEQ ID NO: 1880 - protein, 559 aa, synthetic construct
  REGION 1..559: note = Synthetic
VCTKIKDLQFYPELDNIGAWYGDAERRIWQAIHVERQPVKTVKRDEVKENMTGRQFNSIRIDLEGKKQGLIEGLKRREEDLQCSIERYLEKIEAETKKFGIPAKSRIAHFKAHQFKRRVNTLTHRILEVHAELDAVAPSICFGSRELFYQQFNWQVHGFASFAAWQAAWKEARSHHFYLVGTGKGKGGVSEVGGNQSCTLTLKNYDHANQVLEGTLRLRLPKCQETEATTYLNFEVSFSYNAQHLYNALLTEQPITYQWIKKGNRWHVHALVEEWKVPIISSRKHGGLGVDVNPLHLALGCISHDGNFLWVEDLAYNFKGLKKEARKALMGLMIKDIVLRAHRLKLPVIVEQLDFKAQKRELKSAGYNRMLSSFAYHQFHAMIRSTAATLGVEVIAINPRNTTTIGIVKFEGYGISKDQGAAIAIARRGLGFSERVRGRLVTALPLPAPKQLGRDKSRHVLASWSRLRWGLKLTRKGWQLSGTSRKVKALRDKPVGCRVRKQGRDAGSLSLKVPLTIGSLDQPSGDQVNLASDGLSCPSSDGLRCPYQVGNAVRPARSS

SEQ ID NO: 1881 - protein, 578 aa, synthetic construct
  REGION 1..578: note = Synthetic
QGKKTIETRLSCPEFFPLFDNLLAYYASVRHRLYRDLIVKELPLNDLKSSYILKEKLTARQFNSLAKDVSARAKANEALFRINLKNLETQVQSAKRQCSDVEKRIKVSISQCKAIENYRTKICEWKINSNNSGKATRKPSMPLRIRGVFKNQLIVNLRKLKLLLHHKKRRLCKIILKLDQLKSRGARKLCFGTGKLFRAQYRLETNGFNDHGEWLEFYRLARSSSMTFVGSSDESFGNQTVQFDIEKKRLKIRLPNAGIFEHFGKILVLQNIDFPTFLHSDFENALSNLSGTSKVKRRTAHPITYRIVRRYNKINGRRSYYLQATFTVEAKELSSIEGVGVVGLDLNADHLALCETDRFGNYVDSLMLPYSLRGLNSEQSKAIIGDLAAVVLNHCQRIKKPVVIEELDFAAKKVALNLMPKVRRKFLSSFAYSAFMKAFISKSRSLGISIITINPAYTSLIGAYKYQGLNISSHEKAALAIARRAQKFSEGLEVFQGTLPSQAMMTEKTEHRESLRHVWGFYADNRKRIRKLFIEGDVRPLLPLRRAFSLVSRHGSLKRSYIVIREEREFKEPCRSLG

SEQ ID NO: 1882 - protein, 580 aa, synthetic construct
  REGION 1..580: note = Synthetic
TAFVTEIGRLRCITDAGHSFLQQSAAFCRMERATIARLIADKPVDKPALMVEFGFPGRMVNTAIIHAKGCIDSARECAKLNLEDATEAIGRKLGEYWEASEATDGQAELFGRRRGLAKLVAREARAERAVVKPSVFPGRHAFLRQSELGPGWKADYEASRADHIGCIGSADEACGNSTLQVQLDEPEMREGNLWWWCTVAHAQQVLGYFRLRADENEDLLGILQTNATSKELAEVDAWLDDQGRIIHPKKVAQLQKEGRSPVATRKVLRTVTKGRTALNVMLHRHEDGRWYAHLSYGQTNFPKPFEPVGWMGVDLNVDSIAHACLSNDLVLLSYGKTYFKPDGPAGERTTELYKQINALVAEAKERRLGMSLEFLEFEASKRWLKNKLGVLLRMFPYRKIRAIFEDRCRAAGVPLRFVPSGYSSILGALIAQRHPELGRDQAACVIIAARATEDGNAWLEGLCETATKAESITLRFNAKGLFGCNTTLMGATSARPPHGHQRDHPCRPSSKNPSPLRWQICCGKRVSDISKTMRTDYRATVLAMRRAAVPQGRSNDIPRPQVPTLLINDHYAVLPRNAQL

SEQ ID NO: 1883 - protein, 547 aa, synthetic construct
  REGION 1..547: note = Synthetic
SIPITFTGRLKGITPEGHSMLLLRKPFCRLLRTLVKQIQSGKVPHKPTLCQAFGLPARIYNTAKLAAEGIILSAIESQKVALEDVEIDINRQVVEAFNGPHQEQPGRVRKLMRLYEKQKKLLAQRNHPHIHFGGRYYHEQQTAGWKKAYDDARNDRIGCLGSADETAGNSTFQLKPVFIGGKLIFNLFHAGKVLGHIALKPKEREQLESIQAINCEPFTFSKVVSKQWKNKGQLVSRKVSTGRVPLTIWLIHEENGHWYVHISFFKNKTKADYTPVGAIGVDLNCDSIADTQVQIADGEPLVLHHGKRMFDPAWSKEKKEAWIHEQIRGIVSEAKARNCTVVLEYLEFEHCKRWLRTKLGAMLRVMPYRKIRKAFERKCLERGVVLRYVKSNYTSLLGAVLTSYPNLGRDQAAAAIIGLRASEGGNAWLEKQCKILATQERTRLRINRKRKFGCTVTTEGVMTDRQLENRPANGGSPLDRSADVHRFQSCAGRAISDLSKAMGAHLYKEKVLPVCWKRSGMGTNPWHPVVPDGEAPRQKIECSSLSR

SEQ ID NO: 1884 - protein, 469 aa, synthetic construct
  REGION 1..469: note = Synthetic
TLVAVVRPPKADLDVLASAVGVLARATRTTFSWLYRQGRGAAEVKRAVCAQFGILARHWSGCRAASQAAARSWREGGAERLGMLEQRIRVLDDRWRKDCLDPGKKRRNAVARRKAEVAAARLRKELAGAPRWCFGGRRLLRRGRLREWRWRRDSQALFCGETGRRAGNEVAQWSPDGVLRLRLPDACSRTHLVLRDVRFSAVRQSLLESAVDARSPVTWRVKLLRRGKVQLCVTFDEPEPELVSDPAAGVVGVDLNRDHVAVVDVAPDGRVAGAVRLALRAGSDAVWRVAKAVVARARRAGRPVVLENLDFRSDKAWLRSYGKRFAEVLSIFRSRQVRDAVEREGRRAGVEVRYVDPAWTSELGSLKYRRRCRLGRHHAAALVIGRRGLGFGERLLDGRPTLTRTVECVGTSVGKRVFVQRLPAAWLQGGRRRHDRRGRTPRVLVAGSRASQPDGPPAGDGSPAAVGGA

SEQ ID NO: 1885 - protein, 511 aa, synthetic construct
  REGION 1..511: note = Synthetic
RTFGTIIRSEQAEAVLAPFAARMARARHWQFRELHIKGRPKLAVRKEAQQRFGLTKRQALANEFDLDQAVTAWRGMMRNRIDRLRDRMEQTEGHIARLERKMAGAPPALRASLKMRCHQKKRHVGRCRDTMAACQKTLEGPPALCFGGRDLLRQGAVEAWRDKRQGRFLLVGSKDETAGNQTAQYDPYNGRLVLRLSDADAETARAAGAPVDRRGRVVFENVVFRYGQQDLANAAERGIGITFLFFRDDRRRWHLRATIEQPEVPKLTDIRIATVGVDLNVEHLAVVVTDRYGNPVERATVPFPVAGTDGGTAQAMIGDAVKWVCDLALRYEAGVAVEDLDFGRKKAALKTYGRKHARRLSSFAYSKFGEMIASRCGRHGIDLTRVNPAFTSVIGGVKYATGRAMSRHHAAALVIARRAQGFEERFVCMGDKALGGPGRSQPRHLWSRWRNVHLMASAGGTVPHAPRRSDDGATEDGRLEPRAGPARRRRRTATTASGHHQVRAAVARARV

SEQ ID NO: 1886 - protein, 521 aa, synthetic construct
  REGION 1..521: note = Synthetic
RTFCAIIRDGRADSVLAPFGELMGKAIRAAFKEIHILQRPAGDVQKELMAEFGLTRRHLYGARTDAAQAANAWKGTCDFRATQLRDAIEATEERIAALGRRAEKAKTERKRKALLEAQILKKKRLDVLKGCLASLLLEIKEGVPRVCFGGRKLLRDGDVWAWRDRRNSRIFVPGAKHDNAAGNQSIQWDGENLLVRMPDSLGGHVETLRGVTFRYGQEQLRAVLERNRDFETRAALTWLLFKDGAGRWHAHVTVDEPAAELVTDARNGVVAVDVNVDHFAVTLVDYWGNPVGRLTLPFPVAGTDEGKAEAMIGDAVRALSLLARKRHYGIAIEDLEFSKKKAGLREYGAAHARRLSGFAYRKFAEFTEARCKRDGVDLVKVNPAFTSVIGRWKYAKCRGMSAHHAAALCIGRKALGHGERLVSMDGTALDSPARMSPRAERRRWRGVRRLSREGAHLPVRTAWSGTGTAGKGVPKGTATATTRKARPARTGCRSAGTVQPQVGVAVALASDLSRPSVMFDT

SEQ ID NO: 1887 - protein, 499 aa, synthetic construct
  REGION 1..499: note = Synthetic
RTFCTVIRDTDDEAVLGPWARHMASLRHWAFKQQYVRGRPVKDVKRDGIARFGVSARQFNGIRFDLDQAVNSWRGQIDHRVKDLADQLKHAGKAVTRLERKLQDERRKTDPSRRKIRNVQFGLHQKKRRQATLQARLDAARAEARRSVPKICFGGRGKLRRGEIGEWRERRTRMITLVGSKDEAAGNQTVETLTVRLPDALGGGFKTLHGVQFRYGQAEMRAALDLGAGITWRFYRRDDGAWQANATIEEPAPAVTATTRAGTIGLDLNVEHVAVMVVDRYGNAVERWSEPFPTAGTDTNEAAAMIGDAVKRIVDAAWARGMAVACENLDFQQKKAGLHNVSKHHARRLSGFEYTQFHARLAARWGRCGVELHAVNPAYSSLIGEKKYARGLNLTRHHAAALVLARRAMGYGERLVCMRRDALVSAAQHEARHVWPRWRGARPRRSRETHRPTATSAPGRTRTGAARRSRACAVASPPAVSTRSDRTSAGAAVPPANPV

SEQ ID NO: 1888 - protein, 765 aa, synthetic construct
  REGION 1..765: note = Synthetic
PWPARPHPVSRGGHSHACAPVVAAGRREGLEEHARRLPQHAGVARQVPPRLRVLEDRLERARADWEAGTVHVVRGGKRLARTRHHLHAARLTEAGWRRRWEAERWFLQADGESGKRYGNETIRISPDGEVSIKLPAPLAGLANAPHGPYLLTANVRFPHRGQEWADRVAANRAVAYRIHYDTDRGRWYVTAAWQIPVSPTVPLAAALAHGVIGVDLNADHLAAWRLDAHGNPTGSPRRFFFDLTGSADHRDAQVRHALTRLLHWARTCGVKAIAVEDLDFTTEKTREKHGRKRRFRQLISGMPTGRLRARLASMADQTGIAIIAVDPAYTSRWGAQHWQKPLTGTTRKTTRHDAAAVAIGRRAQGHPIRRRTTPPPHDRSDRAGHRTVQADRRAPGREGPRPPLPGPRTRCVPPDRGAKAGNQNAQHRSGRSAEHEFWQQDSLPLSVQERLHVPLLQQRVGAGERGRGDAEGDPQRVPAGRAGLAEGVGVEDAELVRDGVLEQGLAQALQRLREHEQRDDQRGQQQADHDGDRARRVPDDRADDQREQSEQRDVQRDADRALQPLSTGRVPGVVQQGDVREGDHDGRHQRDHERDHEEHDRLGREDAAAGGTGDHRGADHAGAVLGGRGQYAERDDADAAQQQPEESERQRVLALQTARVGVGGDQRGGPQPDTDDEQHEDAERPHRGAHRLDLRPLGGDRVPEVRGHHRDRRGVAGVGRSGRRLPGGGGLRHRGLRGAHRASSGLVRSEEGTEFGAAGCGAACA

SEQ ID NO: 1889 - protein, 486 aa, synthetic construct
  REGION 1..486: note = Synthetic
MTHHLDEAGLTECVWRGRWEAERWFCQADGGSGKRYDNETFRITPDGEVSIKLPAPLTHLANAPHGRYVLACRIVFAHRGREWADRVAANRAVAYRIHFDTGRDRWYVTAAWQIPPTPTLPIEAALAHGVIGVDMNADHVAAWRLDVHGNPTGSPRRFFYDLTGSAHHRDAQVRHALTRLLHWAQACGVKAIAVEDLDFTAEKTREKHGRKKRFRQLISGMPTGRLRARLASMADQTGIAVIAVDPAYTSRWGAQHWQKPLTSMTRTTTRHDAAAVAIGRRAQRHPIRRRTAPPPPHRSDAVGHRTVQADRRVPGREETRPRIPGPRTRSVGAGRGANAGNQNVQHRPGRSAEHEFWQQDSPPLSLWERSGPASGACQEHGRGGRPGSRCAQHTAPEAIRLRPRLLEQRQLLRRDAPLGPHDQHDVTGGRQFGRRQRRVAALVQHGGEVRPGQQGGDLLGRRRLRDLREAHPAGLLAGLPGRGPPP

SEQ ID NO: 1890 - protein, 378 aa, synthetic construct
  REGION 1..378: note = Synthetic
VHVVRGGKRLARTRHHLAAAQLTEAGWRQRWEAERWFLKADGESGKRFGNETIRVSPDGGVSIKLPVPLAEYANAPHGRYVLAGRAGFAHRGQEWADLVEADRAVAYRIHYDTARGRWYLTASWQIPASRTVPMAAALADGVIGVDMNADHLAAVRLDTHGNPTGRPHRFFYDLSGTAQHRDAQVRHALTRLLHWARTCGVKAIAVEDLDFTAEKTRERHGRKRRFRQLVSGMPTGRLRARLTSMADRTGITVIAVDPAYTSRWGAQHWHKPLSGDTRKTTRHDAAAVAIGRRAQGYPIRRRTTPPPAHRSDAQGHRTVQAGPGALGREGPRPRVPGPRTRCAPPDRGTYAGDQSAQHRSERSAEHGSWQQESLPLSS

SEQ ID NO: 1891 - protein, 487 aa, synthetic construct
  REGION 1..487: note = Synthetic
VDIPRYPDRPDGGRARARGDGVDTNADHLAAWRLDTHGNPIGRPRRFFYDLAGTAEHRDAQVRHALSRLLNWAKSCGVKAIAVEDLDFATEKTREKHGRKRRFRQLVSGMPTGKLRARLTSMADQTGITIIAVDPAYTSMWGAQWHKPLTSKTRKTSRHDAASIAIGRRAQGHPIRRRTAPPPHVRAIVWGIGPSRPTGVLLGVREPASAYPDHGHDPCRPAAERTRATRTPRTVRGVRLSMGSGNERSGGPSRAAAPPRRMRKEADGMLRVPASQVRVSYEQGAEPAVAALAPCPQPGRTAGAYCSSTGTRQTSVVPPSGGDVTSSSPPSCWARSAMLRRPLRRPSGGIPTPLSQTVSRTSRPSVSSTTSARAARACRATLVSASESTATTWSAISPGTWVSSRPSIRRLGANPSTGAASPTARTTRARRACPTALSRERSPKIVERMILMVSSRSSTARCTRSEAWECSMKRPALCSVMPVAKSR

SEQ ID NO: 1892 - protein, 432 aa, synthetic construct
  REGION 1..432: note = Synthetic
LHPDRSQARRRDHRGPWRLVGRLRRQRGRRPRPHLGQRHRGRRLGLHGHPVGRLLRRPGGPDLLLPGHREGRRVRDRPGPGDQRLLPRPHRRLRQGARGGARGGPRSRPHLTTSSDRLVRSPRPTVAPGPRTRTPHRGSRTTGPAPVSTGAGPVCVYDLTGTTQHRDAQVRHALTRLLHWARTCGVRAIAVEDLDFTTEKTREKHGRKRRFRQLVSGLPTGRLRARLVSMADAMGLTVVAVDPAYTSKWGAQHWQKPLTSKNRRTTRHDAASIAIGRRAQGFTIARPTGWTRSSVSSQYGMDVVAYRSSDRGMRLQVLEVAEPSPDASYELFFSDATPKAPGFEQLSFETLDDGDFTGSRLEYLADSMRGEPDIGTWHVVDLRFQAVDGKLYTLAAYGADSDGQEDERDRPRALLSAGDHLRDRHGPWLNRP

SEQ ID NO: 1893 - protein, 293 aa, synthetic construct
  REGION 1..293: note = Synthetic
RWFLQADGESGKGCGTETIRVSPDGEVSIRLPAPLARLANAPHGRYVLACRVGFRYRGQQWADRITANRAVAYRIHYDVERGRWYLTASWQIPPVRTIPLEAARSGGLIAVDTNADHLAAWRLDAHGNPVGAPRRFDYDLTGRAPHRDAQVRHALIRLLHWAKRHCLALAIEDLDFQAEKTREKHGRRKRFRNLISGMPVSRLRSRLVSMAAEMGITVVAVDPAYTSRWGAQHWHHPLTTKTRTTTRHEAAAVAIGRRALGYQIRRRTAPPSPHRSDAVRHRTVQAVSGIPGA

SEQ ID NO: 1894 - protein, 541 aa, synthetic construct
  REGION 1..541: note = Synthetic
RERADREAGRVHVVRGGRKLLRSRHNLEAARPAEAQWRLRWEAEHFFLQADGESGRRLGNETIRVTPGGEVSIKLPAPLAGLANAPHDRYVLSCRVEFQHRGEQWADRITANRAVAYRVHYDVARDRWYLTASWQIPPVRLVPLQAARADGLIGVDMNADHLAAWRLDAHGNPVGEPRRFDYDLTGTAHHRDAQLRHALIQLLHWAKRQGLAVGRRTLQAGPDVQGFEGTRPRIPGPRTRSVCAGCGAKAGDQCAHNRSGHTAEHELWQQDSLPLSRWERWKRTPVDARSPLDRPRQHPLLEVLLDERRQDRHRQQCHHHHRHLHREPRQLTRLDGLGHPHRGLLLLDQLDHDVLQRHHVLVVEVQGRVEPGAPVPDRVEQGDHGQHRPRQRHDDLPQDPEVAGAVDARAVDEFLRDAHEEPAQDKDVEDAHRAGEDQGEIAVREAQGLDQEVRRDQARAEEHRREQQHQEPAVAEGTDAREAVGAQDRHGHREERADQGDRDADDRGPGDLAAAQQFLVGDEGDALGHHHQAAGLVDRPP

SEQ ID NO: 1895 - protein, 553 aa, synthetic construct
  REGION 1..553: note = Synthetic
PSGVAIRTRLKGLTVGEAEVLRLVGAHLGALASRDLKRRCAEGLEHSADTWAERRRAVTGESSSRWAGSITKATHDQWALSRRAQFAHIQNLEAGVRTITHRLSLPVGAKGIKRRPGGYRTRQEWFAKSRRLHLLEERLVAERADREAGRVRVVRGGKRLAHTRHRLAQAQLTEAEWRQRWEAGRWFLQADGESGKRLGNETIRVTPDGEVSIKLPVPLAHLANARHGRYVLTGTVGFRYRGQEWADRVSVNRAVAYLIHLDVARHRWYVTASWTIPPVKTVPLAQARAAGLIGVNTNADHLAAWRLDEYGNPVGDPRRFSYDLNGPATYRDAQVRHALVRLLHWTKGHGLSIAIEDLDFQTEKTREKHGRRMRFRKLISGMPTSKLRARLVSMAAELGIIIVAVDPAYTSRWGAQHWQKPLASKNRKTTRHHAAAVAIGRRALGYPIRRRTRATDGTAPHDPMGSPLLERSRELGEDRAGHRTVQAASGTPGREETRPRVPGPRTRSVGTGGGAKAGDQRGHLPAVAGGAHNRSGHPAEHGFWHQGSSPLSL

SEQ ID NO: 1896 - protein, 467 aa, synthetic construct
  REGION 1..467: note = Synthetic
PSGVAVRDRLKGLTPEDEKVSCQLAHIQSLEAGVGMVRRRLSLPVGKKGSKRAPGGYRSRQEWHAKTRSLCVLEDRLDRERADRQAGVVHVVRGGKRLARNRHNLADAGLSEAEWRERWEAGRWFLQADGESGKRYGNETIRVTPEGRISIKLPTPLAGLANARHGRYVLTARVQFPHRGNEWADRVEANRAVAYRIHFDMPRGRWYLTASWQIPPARTIPLGAALAEGVVGVDTNADHLAVWRLDVHGNPVGEAKTFGYDLSGTAQHREAQLRHALIRLLHFAARHGLAVAVAVEDLDFQAEKTREKHGRRKRFRNLISGMPVAKLRARLVSMAAELGVTVVAVDPAYTSRWGAQHWKHPLTSKNRKTSRHHAAAVAIGRRALGHPIRRRTAPPPHDRSDRAGHRTVQAAPVAPGREGPRPRIPGPRTRSVRAGTERKRVTSVPSTVRGTRLSMGPDNRTHSRSVF

SEQ ID NO: 1897 - protein, 287 aa, synthetic construct
  REGION 1..287: note = Synthetic
DAGTTPEVGAPGHSRHGRYILDARVTFPYRGEEWRDRCRRQADGRLPDPPRHDPWPPVPGRLLDPQEHDHLAAWRLDSHGNPVGEPRQFFYDPSGTADHRHAFTRLLHWAKATGVQAITIEDLDFADSKTREKHGRKERFRQLVCGIPTGKLRAHLISMCADAGIGVIAVDPPAPATGAPSTGPSPSPPAPAGPPATRQQPWRSEGAPSDTGSGDGRHRPRTTKAIVRGIGRPRRGARSTAGRCSCGRCRGRAACGGWRASRRAGWARPRTSGRRGRPSCRGTARAG

SEQ ID NO: 1898 - protein, 1073 aa, synthetic construct
  REGION 1..1073: note = Synthetic
VSIRDRLKGLTAQDEKVLRAVGAHMGRLACADLARRCRDGLRHCTDAWAERKRELTAASSSRWAGSVTSHTHAQWGLSRRAQHRHLVSLDAGIRTLRHRLSLPVGAKGIRGKPGGYRSRFEWFTKTRRLAILEERYEQVRAEREAGRVCVVRGGRRLLHQRHNLAAAHKTAEQWRAEWEAARWFLTADGESGKRHGNETIRVTPDGEIGIKLPAPLAGYANARHGRYVLTARVTFPHRGAEWRDRITGNRAVAYRIHYDVARRRWYLDASWTRKDLPVIPLDALRTEGVIGVDTNTDHLAARLLDEHGNPMGAPRRFGYDLAGTADQRDAQLRHALTRLLHWATACGVQAVAIEDLDFTDSKTREKHGHKKRFRQLVSGIPTSKLRARLLSMCAEAGVSVIAVDPAYTSMWGAEHWQKPLTTKRRPATRHDAAAVAIGRRSLGHRIRRRTAPPPHHQSDGAGHRTAQARPGTRGSEGNRPRVPGPRTRSAGAGHGRNAVDQNTQDRSGCSAEHVQLMLSLQERSVPLADVVEQIGGGPLDPFVDIAGPVEGRGPGEGAGGEDEGAGRGAVQRRLLVAPDARAVPVGRVGEQDARRVVRQLGARKVAVRLARDQAGQLLALARARRVPQPVVGVAHDQRGGLGDLADVLDAQQPLLRLALLAPERRPAGPAPFSAGEQPVGGAGGQRVQLDLPVHGVGGEEDQGGAAVPGLLGGPAHGPGPVLVVAREDQAPVAGRVDAARVQIAGVGVADVVAVALGPADEVVCVPDVQREARARVRAVERDGGRGVLLAEQHAVLVPRVVQAGAGPAVLGKEVVRLPRHIRQDQQQVGPVAVAHGEGDVRAVAVGGGQHGDIRARGPVVRDLQPPGEPPVVAGDGAVRGERFGLLDAGEPGAGGDLPGALAAVVPDPVDVHAERLRGIDRDPEIDGLARRGAARDRGEALDLAAHIVRRARPAAGGATGARALAPEEPAARQVADERRGAGGLAGGGVETVDVPRHEAAVLEVVLADPQPGERPLAERIRDGVCQRAGLPATDLPGLARMPGPHLFHLSPPWPPRCSLLCAGPPGGSCAMTS

SEQ ID NO: 1899 - protein, 748 aa, synthetic construct
  REGION 1..748: note = Synthetic
PWARTWDASNTHDQWGLSRRAQHAHLQSLEAAIGMLRHRLSLPVGEKGSRGRPGGYGSKREWFRKSRRLAVLEERYAQVRAEREAGRVSVVRGGRRLFNQCHDLAAAGRTADQWRAEWEASRWFLTADGESGKRFGNETIRVTPDGEISIKLPASLAGLANAKHGRYVLAARVSFPRRGEEWRDRVAENRAVAYRIHLDMIRGRWYLDASWTRKALPVVPLATLRAGEVAGVDMNADHLAAWRLDAHGNPTGQPRRFDYDLTGSAGHRDAQLRHALIRLLHWARATGVTAIAVEDLDFTDSTTREKHGRRKKFRQLVSGIPTGKLRARLVSMCAEAGIGVIAVDPAYTSMWGAEHWQKPLTTTNRKTSRHAAAAVAIGRRALGHRIRRRAAPPRDDQSDRRGHRTAQARPGTRGREETRPRVPGPRTRSVQPDAERTRGTSASKTVRGAPVDQAWVQDPLLLTVQERYRRSHGHPRGALGHRRHDLRLRERGPDRDAGAPRRRGAAGHLGLCGGGPAALEGAHGAALAPVRGRGRGLPGPAARPGAGLPRAAGAHRRRGRRLVRPVRGPLRGRLGALPRHRARPRPAGPGLPPRSAVQLQHPQPGAQAPRVGRTGPLRGRGVRRRAGRGQARPGGLPRRLHRPGPAPPPGGVRRGPAGHRRPGCRGGGPAGDLAGPRGDRRETRADPDHRPPSAARAAACGYAFWSTVHLRVMFFLRRGERAERPESPGSASRAGSLLEVIKFRWPMV

SEQ ID NO: 1900 - protein, 880 aa, synthetic construct
  REGION 1..880: note = Synthetic
ATGVAVRDRLKDLTPQDEKVLRLLGAHLGSLAATDLARYSRAGFERTNRSWAARKQDLTAQSSSRWAGSLTKGTHDQYALARRGQFAYRDKLTDGIRMLTHRLCLPVGEKGTQGKPGGYRSKGEWFNKSRRLHLLGARLVAVEEDIATGRVHVVRGGKRLANNRHNLAAAALTESGWRDRWEAARWFLSADGELGKRFGNETIRVAPDGEVSIKLPRPLQHLANAPRGRYVLSARVAFQFRGEEWAARIAHNRAVAYEIHLDVLKGRWYLTASWKRPAVQVIPLQAARADGLIGVDTNADHFAAYRLDAHGNPVGNPHRFTYDLTGSADHRDAQLRHALSQLLRWATRTGVSAIAIEDLDFCDGKTREKFGRRKRFRQLIHGIPTGKVKARLVNMAAEHGLALVAVDPAYTSQWGAEHWKTPLASSKRAMTRHDAAAIAIGRRALGYPIRRRTAPPRTHQSDGGPPCPLPRRPLGAAPRPVDPAGRAAGPAADRPGAGRTHVRRCRTQHRHGRSRPPVRALPAADRRASRPAGDHPHTGGLAAQPGDRPGVLATAPTSCTSPSCRTRGRRSMISVSRCRSSPLAAPFLPGTRALGPNRSPLPQTSRTRSFPSARPAPDAAGPSGGDAEFFARPVDELADGRLAPPGGEGGVELADVVLGPGGLDAGEDVDGPVAEFEAVVEVTGLEVGGPDDGEPHADGTGEHARRHRGRLLVPGEGGLGVLQVAENLGRVRREAGMAIEVDPGGLVAAVVLGLTQEVLGGFQGPGGGPRVVLAGVSAGLDQLGERQDSRRRLAIGPLEGALSHIDGLGREAPHQGLHRHGGQHIAAQLHVAAGAGEAKGLDEVPLGGIVLTDIEGCPAGDYLELSGILAGQGVASAAGT

SEQ ID NO: 1901 - protein, 290 aa, synthetic construct
  REGION 1..290: note = Synthetic
VGRAQACADTVVLVAVGGVDHEGHPPSVGTGKALPGRAHRATGDRHCHDDHYAAWLLDMHGNPVGEPRRFPYDLTGNAAHRDAQIRHATSRLLHYARQRGARTIAIEDLDFTDSKTRERHGRRKRFRTLIARFPTARLASRLTSMAAEQDISVIAVDPAYTSRWGAQHWQKALTTPARQTTRHDAASIVIGRHAQGYGARRRTAPPPRDRRDRVGHRTAQAAPRTFGREENRPPRTGPPPPRVMSPPGTRKRQPSSSNTVRDERSEREWTNGPLPLTGQGRSPARVNASH

SEQ ID NO: 1902 - protein, 956 aa, synthetic construct
  REGION 1..956: note = Synthetic
RAGAQTRVHHRTAVRPPGPGAARRAGGCDPARPPRRPAVAGRCRRQHDALPRLPGRRARPAARRRRPGHRRRARRTARRRRPGGDRNCRRTGADTAPAAPQAVDPVGPAAVQRQGGGVQVDVPAERCAARLRGRGDHSRPGRRLLSGPARHPGPGRRTAPHGARRTVERHARPAADSGHPARGRPAGRRARRPALRKTPAPGAYRTHARQPGHPTRTAPGAEEDAGAGRVPHACAGRTRTAHMRRQNAYRTHAQTERVPHAQTEKGGGARHRGRPPFRCVRVRRVVSRAEHLGDQEGQFDRLARVQARVAAGLVAQGQGLFVDLLGTAQAFGDAVAGELDVQAPRVGAECPVDLEEALDLVEDVLEPAGFVAAGRLVGVAVHRVALPHHPVAARLDLLHDRRQHVTHPVPAHPADQGEPARHVVRVEALDVLDGLLGRGGGAELEPDGVGQQCCQRDVGTVRAAGALADPQHVRGQPVQPGLARGGGRPAQQALLVLQQQCFVAGVDLGGVQGVVVGAAGRHEGQAAVDLLGHRLVALARGGVAHEVAVPLVHPAQVGQARAGQGAHQVEGGGRVRVRAQHPRGVGDPGARGGLERVDDVAAVHRKAQRVGGVGAGLGVLPGDPPDLHDREAGRVRQHDRHLQQGADVGADVGLGVALEGLRAVAGLQQEGLPLRHLRQPLLEAVDLARKDEGWQLGERVSGGGGAVRVRPGGLLVGRPRRRVCQVGLDVVGEPGEGPGLRVRDVADGGVHGGRLGRRRPRQGNRGGTGREPGGGAGAQIRHALTRLLHHTAATGAAAIAIEDLDFTDGTSREKYGRSKRFCRLIARFPTARLRARLVSMAAEQNIAVVAVDPACTSRWGAQHWQKPLTGSRRKVSRHDAASVAIGRRALGHPIRRRTAPPPAYRSDEQGHRAAQAGPDTRGREGPRPRTTHRMRAARQRSESGRPEHPAPFGAFG

SEQ ID NO: 1903 - protein, 383 aa, synthetic construct
  REGION 1..383: note = Synthetic
SNTLNGNGGKRLAKTRHHLDKAGLTPAQWRDQWEAARYRIAANGSPDEPFGNLTITVTPAGQVSIRLPKPLEHLANAARGRYVLSGAAVFSHRGDEWAQRITSAMSVSYTITRKPGRAGRYLSASWAIPSVPYWVGRDDCAVGDDVHAEGPVVGVDLNDGHIAARRLDAHGNPVGAAERIDIDLTGSASRRDAQVRHALTRLLHYARRHGVTAIAVEDLDFADARTVGRETLGRGARGKRFRKTVSGIPTAVFRNRLSGMAAAAGIQLLAVNPAYSSIWGAAHWQRPYRNVTRHQAAATVIGRRAQGFPARRRKGVTPTRPEDRAVRATNQTGPDSHRANTGSRRRSGMRGTESRPPNRNVRGDHPRRATVTPAPANNGQHHV

SEQ ID NO: 1904 - protein, 554 aa, synthetic construct
  REGION 1..554: note = Synthetic
PAGVAIETRVRTTCADDRVLDAVAEHLGRLRRADLAAVSRPAPVDSTLDAAGCRQARRDRLNARKKALTGQSSARWANAIIAGNDDQYRLARDAQHRHIGGLRTAITTIEVRAAEPTSDTQTVSKRRSCRKVKSARGYATQAERFQKLRRCQHLRAELAAAERDRAAGVVHVVEGGKRLAGTRHHLDVAGLTEPQWPQRWDAARWRIRANGSPDEPFGNLTITVTPAGQVSVRLPKPLEHMANAPRGRYVLSGAAVFSHRGEQWVQRITGGNSISYTLTHKSGRAGVYLAAAWAIPALPYWAGRDDCDAGGDVFAAGPVVGVDLNDGHLAARRLDVHGNPVGSPERIDIELTGSALRRDAQVRHAITALLRYARRYGITTIAVEDLNFTDARTTGRETMGRGVRGKRFRRTVSGIPTAVFRNRLAAMTAHAGIDILAVNPAYSSIWGGQHWQRPYLNVTRHQAAATVIGRRAQGLSARRRKGVTPQRPEDRPVRATNQTEPTNPTATGRRHEPRTRGTASRRPNSPRTRQPDRATVTPAQLANNGQTSAVTVPS

SEQ ID NO: 1905 - protein, 558 aa, synthetic construct
  REGION 1..558: note = Synthetic
TGALTVRTRLRLSDRDAVILRELAEWLSRLAARDLAERVTLGARHTAADFARRKRELTALASSRWAGTITRGSNDQWQLARRAQTAHLERLTAEIATIERRLAAPVGGRDEATRTKGYPTRRVRAAKQQRLQSLRARAARVASDAAAGRVHVVRGGKDLLRGRLRPDSAGRSLEEWRDRWWEARNRIEADGEAGKTYGNQSLRVGPRGDVLVKLPAALAERHREHCDRFGRYTLDARCRFAYRAEEWRAQVEAHRAVGYTVRFSGGRCHLVASFTPAEAGPRAGPGDEALMAAALTGGVLGIDQNADHLAVWRLDTHGNPVGRPGRIDADYRGPASRRDAQVRHLCAELIREARRFGVTALVVEDLGFDTGRERCGWAGRSGRRFRSSVAGIPTARFVSRLVAMAPRAGLAVVVVDPAYTSRWGAQHWLRSTSTTRRKTSRHEASAVVIGRRGQGLGARRRAEKSVPRGKTEEAGRSHREVRRRRAGTETHRPAAHDSGPGFLRAPTTADRPEDGARDAPRRRTPTAVQAAQDRSGQLAGGTRVPAPRDGWTPLQGFT

SEQ ID NO: 1906 - protein, 331 aa, synthetic construct
  REGION 1..331: note = Synthetic
VHPDESWLEIKLPAPLAHLANRPHGRYRLSCPAEFCYRGDEVAAQAMSGAVRYDISHDPARGRWYIDASWTAAPAPAASLDDLRKHPVVAIDVNHGHLAVAVIAPDGNVLGAPATIPLELAGLPSGTRDGRLRAAISALIATARARGARAIVIEDLDFAEARAEGRERAGSRPSRGRRGRDFRRAVHGIPTARLRDRLVQMACNAGLSVIVIDPAYTSRWGAEHWLRPMREHHPKATGHHAAALVIGRRGLGYRARRRATGNQTAPEEAARPAQARPRTTPPPGTAPRKPANPRGPRQPPGTKTRRPHRTTAGNQAAQDRSGRRLARTMSC

SEQ ID NO: 1907 - protein, 548 aa, synthetic construct
  REGION 1..548: note = Synthetic
PAGARVRARLRLSPEDEAVLRAVGRHLGSLAGQDLAVRCAEGRLDARGEAASRAARKKALTAESSSRWAGAITRTSEDQHRLAEQNLRAERASLQARIRRIEARLTVPAADRSGRVRGYAPPSERHAKAIRLRALKARLARAERRLEAGAVSVVRGGKALLRTRNNLAAAGLTEAGWRREWEAARLFLTADGEKDKAWGNETIRWHPGEGWLEIRLPAPLAHLANRPHGRYRLSCPVGFTYRGGEVAGQAASGAVRYDISWDPARGRWYLDASWKAAPAPAVPLEELRQHSVVAVDVNHGHLAAAVVAPDGNILGAPVTIPLDLAGRPAATRDGRLRAAITTLITIAEEHAARAIVIEDLDFAGARSTGRERAGTRPSRGKRGRAFRRAVLGIPTGKLRDRLVQMAANAGLYVIVTDPAYTSRWGAQHWLAPLREHHAEATGHHAAAAVIGRRGLGHRARRRANGNRTAPEDAARPARVRTRTTPARGPAPRKPGAPRDPRQPSGAKTGRPHRITAGNQAAHDRSGPPARRDYVLPNVSRNGEPVPPA

SEQ ID NO: 1908 - protein, 888 aa, synthetic construct
  REGION 1..888: note = Synthetic
PAAARVRTRLRVEVADEDVLRVVGGHLGSLAGKDLAQRCREGKLSAKERAESRRERKRAITAASSSRWAGAITRTSEDSFKLAWRNLVAERRTLASRIHRIERRLTIPVGERRGYLTRQESYEKRRRLQHLRARLAEVERRLVGGRVSVCRGGSRLAKARHNLDAAGLTEATWRERWEVERLFICVDGEASQLFGNLTVRWHPAQRWLELRLPKALEHLANRPGGRYRLSCPVEFPYRGEEVAAQAESGSVGYDVSFDPGKHRWYLDASWSISEGELRPSIDHLRSGPVIAVDLNHGHLAVCVLDPSGNPIGEPVTVPLELTGLKASTRDGRIRETISKVLALARAHGAGAVVIEDLDFVAWREEGRERSERRPSRGKRGKDFRRLVAGLPTGKFRDRLVQMATNNGVAVIAVDPAYTSRWGAEHWLDALEQISPEASGHHAAALVIGRRGLGHRARRRERCDSTRAVHRDERAADSVVSGDRRPHTEPEDREAGGQPRSRQRTLPGERAPSGDEATEDRSWSPAGQDFSSAQCLGTVALDHPDGVIAFLSEPIPLAAAIAEECNLRFHSRRTADLLTNKYRRRLALARARVPGPEFWPVPADTDPTARSHLAADLSYPVVLKPQAGSGSRSTYRVADAETLLRLLGEAQRRAEDMLVEDVLAEAHPRDAQRFGDVLMVDSLVSEGRIVHFVVAGHFIPAPPFRGTGSYIPSDLGDAETKAVLEATEAAAKALGIDNGFVNTDLILTPDGPRVLEVNGRIGGQIPTLLQLLGTSPLLPEAMRFAVCESDGDVVPLRSEHVAFCAMYQPPMEAQRLVELSGLDAVALLPGVTQVIPARRVGDAVDWRRGTISRLLTVYGVANDHDHLYELYRQIQRSVVTRYEMAEPVS

SEQ ID NO: 1909 - protein, 555 aa, synthetic construct
  REGION 1..555: note = Synthetic
PSGARIRTRLFVTDEESAVLRQVGEHLGSLVGKDLAVRCADGNSDAQVKAYSRRFRKQELTAASSSRWAGAITRTSEDSYQLRMRNLKAEVQSLHTRVKVITERLTRPAGSQDGSGRPGYADQAERFAKQQRLQVLSARLAACETTLGSGRLSVCRGGWRLAHSRHHLDDADLTAEQWQEQWRAQRLFLCADGEADKAWGNETIRWNPNQQTLQIKLPAPLAHLANGKFGRLALSAPVDFPHRRAEISAQAATGAVRYDITYNAIKHRWYLDASWKTDPAAPLTLDEVRYGPVVSVDVNLGHLAVAALTPDGQPITVPFTITLELDGLPATTRDARLRETISQILRFAAEHRCGAVVIENLDFERARIEGRELQGNRPSRGRKVRRSVAGIPTGQFRDRLVQMAYNAGVTVVAVDPAYTTRWGAEHWLPTLRAQFDNKLSGHHAAAVVIGRRGLDQRAKRKGERVTGPHQRMKRATPEGVARVGELRNPFDGPSRAVAPGLITTTARQGKRNREDSRRPSSDGSKTERPNRRTLSEQAQDRLGPTTTANFLLRRV

SEQ ID NO: 1910 - protein, 559 aa, synthetic construct
  REGION 1..559: note = Synthetic
PLGARIRTRLRLNADDEQVLRAVGQYLGRLAGQDLARRCRLGQGPDQRTDRKRALTAPSSSRWAGAVTRTSGDQWARAYANLLEARTGLRRAVKRLRARLAVPVGQARGRGRSRVRGYESQAERFEKQRRLQHLRSRLGEVEGRLAAGRVSVCRGGRRLAKLRQAVAGDGGGGGGGGGGGGGGGGGGKDGRTTQVTEAQWRERWEAGRLFLTADGEADKAWGNETIRIHPDEQWLELRLPGPLAHLSNTPGRAATYRLSCPVVFTHRRHEWAAQAASGAVRYDLRFDPAKRRWYAAASWRLPARQVPSLEGLRQDRAVAVDLNAGHLDAWVLDPSGNPVGEPATVALDLDGLPASTRDGRLRAAVAAIIRLARAGGCRSVMVEDLDFADARQTGRETLGRGARGKAFRRTVAGMPTRAFRDLLVGMAANADLWVVAVDPAWTSKWGGRYWQAPLTESTKTSVTVSRHHAAAVVIGRRGLGLGARRRPGVTRPHQRMGKGELPARLGGRAVGCEGPGPPGGQRAAARPRKTHPAERIGLGDQAVQDRLGPPGQDPLLLTQ

SEQ ID NO: 1911 - protein, 570 aa, synthetic construct
  REGION 1..570: note = Synthetic
VTTLRIRARIHPSDHDRAVLTALGEHFSVLLGKDLAARCRAGKAHDKTMWAERKQALTKGCSSRWAGWVTKSSNDAYATARRNQRRELADKRAAVAAIEEKLRLPIASTAERKALVARERDLAKTENRKPRRLSFGYHSRNEHAMKRQRLGVLQAHCARLERDLAAGRVQVTRGGKKLLGNRLHLEEAGLTVAQWRTRWHAARLSFGANGEANKLLGNEAIRLFPDGTLEVDLPAQLAHLANVTARGTTRYRLDAKVAFSYRRDEWLAQVEANRACSYDVMFSENGRVYLDASFTPAELPNVGELDELLADPELRVLAVDLNAGFLAPAVLDRSGNPVALLDHVPLVTEGMSAPTRDGHLRQCVTTLLDVAEVHGCRLLAVENLGFAALRATARERYGANRRFRRTVCAIPTAQFRDRLVAMASRRAIAVVGVPAAYSSIWGAEHWQAPLSTKQHKVSRHTAAAVVLGRRALGHSARRRHLHAAVPGVTAPDRRIEAAATGEPVRSAAGAASYHADGNREPSARHQATGRPQRREGDHQTRSANTGPPGARPAKTVRAGPLGEGSLSLSV

SEQ ID NO: 1912 - protein, 340 aa, synthetic construct
  REGION 1..340: note = Synthetic
MRRSASTSRASCGSKSRPPWWTGSVRICTSPHRWRSAIAARSGLIGWPAGGRFVMTSPSTRRKAAGIWTPPGPPRPAPTLEELRAGPVLVDLNADHLAACVLDCSGNPVGAPVTIPVDTAGLPATRRDGRVRAAITALLDLAVHHNCSAVAVENLDFTDARATGRETLGRGQRGKRLRRAVAGIPTRRFRDRLTSMATRRGIAVIGVDPAYTSLWGRQHWRKPLQQQTSNPAAVTVHHGAAAAIGRRGLGNPIRRRPAGPRTQQRMRAGTPPARPDQPPGTTRRCRSSGSPPRPQRRRGMPVHQRTPTISGQHRSGRTGLLLLTNQERFRAAQSTPCAGR

SEQ ID NO: 1913 - protein, 323 aa, synthetic construct
  REGION 1..323: note = Synthetic
VGGNRLWRTRHHLDAAAMTEPQWRQRWDAARMFVTADGESGKTGGNETIRVEEHGMLRIKVPAALVDQLGTHLHIAAPVAFTHRGDEWAARVAGRHAARYDISLDPQRGRWYLDASWTLTPPPVVDLEVLRAGRVLGVDLNADHLASCVLDSCGNPIGAPATIDVQTAGLRASRRDGHVRAAITTLLDLAESHQCAAMVVEDLDFADARASGRETLGRGRRGKRMRRTVAGIPTRRFRDRLTAMAARRGVSVIGVDPAYTSMWGRQHWRKPLQQQTSDPTAVTVHHGAAGRDRQTWTRHADQASAGRAPHPTVDACGHSTSQT

SEQ ID NO: 1914 - protein, 380 aa, synthetic construct
  REGION 1..380: note = Synthetic
VLDAHGSPTGVGMLEVVLPAALAHLANTAGVSNTASRRYQFAAPVAFAYRSAEWQTRVTGRQAVRYDLSFDPAKGAGRWYLDASWGSATTPAPDPSGAAATAPFVPLTLDQARKGRVLGVDLNAGHLAAFIVDAAGNPVGSPFTIPLVTRGLAGPTRDARVRHAVTTLLELAASNGCLAVAVENLNFTQARLEGNDGQGAGARHGSKGRTFRALVAGLPTAQLRDRLAAMATRAGVTVIAVDPAYSSQWGRQHWAAPTCGRPVQTAALPGSDTLSAAHVTTASSHHGAAVVLGRRALGHGARRTTRTARTTSTTSTGLVDRVRAASPVEKPRAAPEDASGTPITPSAPTPRQAARPARPAHEHPARTSAFPGETPAPDTP

SEQ ID NO: 1915 - protein, 596 aa, synthetic construct
  REGION 1..596: note = Synthetic
PSGVSVGSRLRVTDWEQQLLAAVGTHLSRARATDLAAAQRRERANDRQKALSARFGIHSRYAGSICVDNDAAARAVKEQLWAHQQRLQAAFRHVEARTALPSRAACCGCGKRRCHRCGGGYVTENERVMKRRRLDVLRAELAEVQRRRSEGRYGACLGGKRLATTRHHLNQAGLTERQWQQLWLRRRAWFGCVGNAGVLGGNPCLSLRQDAPDRPGEWFLTVSAPGPVRARFGCGSQVRLTHPVPLHHRREELEERLSARRAVRLDVDFTIDRRGRGRVMLRVAWVRRAQPALTLQQARLGGLVGVDLNANHLATARLDQDGNPIGRPIRIPLDLDDLPTTTRDARLREAITALLDFAATTGAQAVAVEELGFTDETTREKHGRNRRFRRLLSGFPTLAFRRRLAAMAATAGLAVISVDPRYTSKVGGRDWQRVLTGGPTAPLTSQTSVTRHHGAAVAIGRRALAHGLTAGPRGPERRSAPHQRRRPDTRPAGRGDGSTSSRSAPVRAPGAPARPTPRDRAGARAARRTPAAVSAPAPPPFGGRGPGETGRRAGRTPRIGSAAPQPHRADGTTPAGRDGCATSAHPSHPAAEPSSR

SEQ ID NO: 1916 - protein, 351 aa, synthetic construct
  REGION 1..351: note = Synthetic
VVGGRRLLHTRHHLADAALSEAEWRRRWEASRLFLTADGETGAPFGNYTITVHPDDGSVTVALPEALRHLANAPRGRYLLSCTVRFSHRRDEWLDRVTAGRAVRYDLTHDVERGRWYVDVSRAVENPTPPTPDELSAQGVRLLGVDLNADHLAACVLDSHGNPVGAPFTVPLELTGPTNTRDGRLRAAISQLIRLAHQHGCAGVAIENLGFTDARQTGRETMGRGRRGKTFRRTVAGIPTARFRDRLRGMASHAGLVVVAVDPAHTSVWGRRYWKEPLQQQTRGKTNVTVTGHHAASVAIGRRALGCGIRRRSGRAHDRRIVCAEPTTRTDPPPGRGGPRAHAGYRAHPLG

SEQ ID NO: 1917 - protein, 542 aa, synthetic construct
  REGION 1..542: note = Synthetic
PTGQRVRTRLHLTETEASVLSETGAFLGFLAAKDLAERCALGRGYKHLGRKERKQGLTATASSRLAGSITAATDNQWQLAFDNLFRDLFSLRDAIALLEKRCAIPTGTSVTVNERTTHGYPTPRVRYAKQQRLQQLTARLAEVEERIETGRVRIVRGGKGLLKKRHHLDEAGLSKEQWTDQWHARRLFLTADGEKDKTWGNETIRVNPDTGVLTLRLPTALSHLSNTEVITITAKKVPSFVFESAVAFSYHADDWAAQVASGAVSYTISFDPLRSRWYLDASWKTPTTPTPSLASLAASNTLGVDLNADHLAAWVIATDGNPVGNPIRIELDLTGSTERRDGLLRRAITQLLDVASTNNCASVTIENLNFADVRSSGRETMGHGKRGKTFRRTVSVMPTAKFRDRLAGMAANRGIALIAVDPAYTSKWGAEHWTRPLTAQSKDSNQPLTRHECAAVVIGRRGKQHRARTTTRHLPARHQRMTDGQQVLGADPTVETKSGNTGTGEGSGRAARKTHLRESDEPVTPGPTRPFGRPVVHRTIVH

SEQ ID NO: 1918 - protein, 559 aa, synthetic construct
  REGION 1..559: note = Synthetic
PSGAATKTRARVTSIEDEFLYLIGKTLGGERNKDLALLLATGGKRVGKADWNARKTSLTARTSARWAGAITQASHHQYAVGMRCLRAERDSLRIRIKTISERLAVPHLSANPTRKPYREGEWYAKARRLAVLQDRFDRVVDRISRGHPRIVFGGGRLWRNRENLGAAGRGEQEWRREWDAQRLFLEAPGETGRRFGNDTIRVGPDGTVTIFVPAILQNQIPPELLNPKDPKHITLSHKVSFHHRGGEWADRVHANKAVKYAFAYTPSASTTGGRWFLTASWSYPPTVSVPLSALRAQRTLALDLNKDHLAGWVVDSRGNRVGEPVTFVLNLEDFAATTRDAWLRHAVTTILKYAREKECASVTIEDLNFTKDSEGRDSPSSTRWLRRIVAGMPTAQFRDRLTAMAATQGIPIVAVDPAYTSKWAKQHWLKSLQPTPSSSRPLSNATAPPRVERHHQVSVTIHHAAALVIGRRMFGLSARRRMNGPRQRQRTLAGQPAVARDSVATIVQAKPLAEQSLTPIRESTLRQQVKTVGSHPVGSRQPFTGHSHSGSNIPTLPNT

SEQ ID NO: 1919 - protein, 530 aa, synthetic construct
  REGION 1..530: note = Synthetic
PSACSIRTRIKGSERDFEVLEILGDYLGHLANLDLTWAQDNVTARERKKRLTMEANARWANSIMAETDRRIKSERTNRWRHLSSIGRAISCINKRLNAKSDNQYYKPYLNASVAGLKIIRRQNLIDRLNKIKTSPISIVRGGHALWQKRQNLKATGLTLAAWQAQWQAARMFLSAKGSKDESFGNCTMQVNPETGICSIALPASLAKIYANSPDGKHYILDAKIEFFHRQNEWLGRAQSKTTEAKAITYTISHRFELKGRWYLDAAWTYQNSESPAVHPKLKRRLGVDLNADHLAVWPINNDGNPVGKPSHIPLNLKGLPSSTKDGRICWAISQMLKLAVKLNADLACENLGWADQTGRDDQIQGRAFRKTCAGFPTAKFRKYLTLMAHNAGVSIVIVDPAYTSQWGQEHWGNFQVANHQTTSHEAAAIVISRRSQGQSARRRTSNSSSLARREQRAAGVQCDRQPKALTQDQSTLDKLWVQGPDARGQPPAPKPRHTTQRPARERSLVPVVFQNSPLALAKVNSSEHFS

SEQ ID NO: 1920 - protein, 562 aa, synthetic construct
  REGION 1..562: note = Synthetic
PAGVAIEARAYLDADDLGVVLPLGDLLTKLRNQDLVRTISGVPWAARKALITQETSARWAGSITQSNNDQLRLSRDNLVRAIEGWSKAIKTIAKRLAAPIPEKKVKGETPLAPAPATVLAQIPGFDDQTTQGKRHRRIVGYASQAERAAKQLRLAHLQAKVVSAQADLASGEISICKGGKDLLNKRHHLDEAGLDLAQWQEQYAAARRFLTADGEAGKKWGNETIRVSPEGVVTIKLPPALVKAGLGNVGRGKDKTHYQLSTPVTFRYRQDEWLSQIRDNKPVSYTLKEDPVKHKWYLCAAWTQEPVKVRRSTNKPNILAVDTNANHFSARVIDPSGNPVGPALYVPLLLGLASKSSRASDGIIRAGLSALIRFAKLPCWKVGLVVFEDLGFADSKGREKFGHHKRFHKTISGFPTTITINRAASMFARAGLELWVIDPAYTSKWGAKYWLTRLSSPTHKATTHEGATAVIGRRFLGHGARTRSGVGVGEQSISNPSLPIAPGVHPKPQAAGKATAPQLSVKRSLSKTDPGKQTQSTPPGDDRCRPAAFFTPDNSDVRFVRF

SEQ ID NO: 1921 - protein, 516 aa, synthetic construct
  REGION 1..516: note = Synthetic
PAGIAIKTRLILSERDERTLRALGSHLGALAGRDLVAVLGGQSWTARKQTLTSESSSRWAGTLTRANNDQVKLARMAQQAHRAELRAAIGAITRRLNLPCQDSPCALDDKGKKITSGYRDQGEHWLKAQRLKILQAELAWVETDLAAGKLHIVRGSKKLLKARHSLEDAGLTLDQWSERWWAARSKISANGSHDEPLGNLTIGVSSEGTCSILLPPSLRHLANDGHRYVLEARVKFSYRESDWKAQLAQNGALAYEISYDVRKSRWYLTASWTHASAESETVHNTSQFYVGVDLNSDHLACWLADPSGNPVGRPIDIPLILQGSRGLRDGHLRWAISRLLVFCKIQGAKTLFIEDLDFSDGKSRENFGHNKPFRHLISSFPTSQFKNRLQAMAARAGIELVAVDPAYTSKDTKSWIKPTSTKFQETTSHQGAALGISRRGLGLSLSRRKGVPQSHQRMTASELPTSSRNQPGSLSQGRSASQRQPGVSPSLPRPIAAYLRPPRTVRGGPLISNCQR

SEQ ID NO: 1922 - protein, 546 aa, synthetic construct
  REGION 1..546: note = Synthetic
TPHITVEAPLYLSEADERVLKALGGQFEHWAGVALRERCRYGSTFDKDAWMAIHHQVRAAGAPTVYANAVVADAKALWRTTRKAQRRQLQDVIRALRVLDQKLSLPPGDPKGYRDRKTWDGKFRRRQHLRSKQARLQRKYDEGRLSITRGGKHLLRNRHSLEESRFGSVDEWRVHWEARRRSIFGAGSSGPHSSLWCRVDPDSGEIFILLPETLRAYANVNPPHTTLPWYRLDAALDLSHYRGRQAWRADGFRRARQQGRPVTYSFSYDPAIRQSRGGWLVRATFEVPLPSAPIKKVGDVRGLRVAAVDLNADHLAVQLLDQSGNPTRARATLALELEGLTTAQRDGLLRRTVEDLAEFCRRHQATVVAIEDLGFSDGTAGRETIDAKKLRHVRSQFPTTIFRHRLVQMLSRRGISVVAVDPAYSSVNGARWWEDTVPEAKKPLSRHLAAAVVIGRRSQRYPDARSSRCAPATYQRIGDGNANGQHRGAGGGQPRSHAPPGSQNRSRGQVGVWHGEGQPVGGRPVTDNPFWDTPEPESVDHSVRSA

SEQ ID NO: 1923 - protein, 484 aa, synthetic construct
  REGION 1..484: note = Synthetic
YVTRNYQARMRFLDNGKEKLELLGAYLGEIRNSDYAALVKSEQNKAEYSRKQRREYGRNNFLTTRIMDTIISSNNEQLEFAKRTSEANIQAWLKDIDRYEKQLKNTNIRGKKREYLNIQVEKTRSKISRSENRSPSCCFGGKKLQRDITLHPDDQDKRTTWVNKRMFLSFDGANHRSLGNDHVKLMPCEDKFLVVLALPKELSSNLGFTPMSTEMREKYGVKNNNHHVIGIIELKYGKDNVKYCLNTNTCLSYQFVWSHKKQCWNIHITTRINKYHIEQKNKRYAAQIIPGRVCGLDQNSGFITATIIDQHGNPLTQKTFTHSSSKEMSKLVFEIITWCQKNYCGVISIEKLTHLHQRARKSWGDAKAKNRVVNKIPYGEFTTRLAQSCEMRSIQLVKVFAGGTSSMTTQWKEDYFGQTIHEKASYLVARRGLGLSLKRRNRHRNSVCDEGVIPVPFEGSCDNTVRVASIHDSTCLSMCSGAST

SEQ ID NO: 1924 - protein, 478 aa, synthetic construct
  REGION 1..478: note = Synthetic
YIVRTVMSSIEFYDGAQEILEKLGIILGSLRNTDYVALVASERSDAQLTNKQRRDFLLSQGLNMRYADSIIGSNNEQLVLAKRTSKENITDWRKELSTIEKNLSKNPSGKKKDSLIKSKESIEKKISLSENKRPSVCFGGKSLFREYTRAIEQSTLSLELENDFKNKRMFLEFKGQSGYVSGNTMIHVDLEKQELTLNLTQSLAEQIGVEDTRIPLGVINIRNSGYLQNFSYCIENRVSTSYEFVWNRKKQCWRVHVSTRINQSHIEEKNKSKKTVDKNRVCGIDQNSGFITATIIDENGNPVEKRTWYHSSSKDVQDIVNELTLWCNRRGCYTIGIESLKSLSGKKRRSSGSFSGVNRVVSLIPYGKFRTCLLNKSDFSGIEIVEVNPYRTSKNTSQWKEDCFGITIHEKASYLIARRTLGLSISRKHRQRTSRCAVGVINNGLSLPNTTDDSTVNDYSTCSDRIPVENTRHLTRLE

SEQ ID NO: 1925 - protein, 463 aa, synthetic construct
  REGION 1..463: note = Synthetic
YLVFTYPSRLHLTKEGKNILHMVGLFLSTVRNDDYSYMVSHYRNDNPIPSKSERRKRLMEKYEISRREADYVVYANSDQYQLVLRTSKENIANWNKEITRLQKKLPSLYGVKKKNATDTIANINKKIRKASSKSPSCCFGGSKLQRKITQNHWDDSLREDWDNKRLFLYFMGESGKKCGNDTIKLDSNTGELSIKISSGMQQALKLKNREYVLGEATIKHGKKNVQHSIEQRVATTYKFQWDCNKKEWRLHITTRVEKKSLHKEYGISHIPGRACGIDQNSGFVSCTIVDKHGNPIAQREFHHSHSKDIQALVHSIYLWLKKNHCNEVYIENLKSLSLIKRSSIGSAKALNRTVNKIPYYTFSTLLKRKMEICGGKCTKVNPYHTSKNTKFWKSEKYGKTIHQKASYLIARRGMNLSIVPRCIRQSPQDNSVCLGVSHSKNGVGLVNDIHDNKISNDSVCSDL

SEQ ID NO: 1926 - protein, 476 aa, synthetic construct
  REGION 1..476: note = Synthetic
SKTYTTILKQDDNEKHNLEVIGRVLGIIRNDDYCYLVDCYNNDSKVSKHDRRKRLMNKYLISSREADSIVYSNNEQLELVKRTVKDNVKDWEKEIKQYQKQFNNLKDKNKSDNTAYKKRYYVGLIQKLQSKIIRAQEKSPSCCFGGKKLQKRITQYPNDYKSRQDWVNKRLFLSFMGNSGRCKGNDIIKLNINTGELTARISDGLQSLCAFNSKKLPIGKVNFKHGKNSIKNNIISNKAIYYKFVWNTRKRKWYAHTTIKISLEEQENNFNAKVKNSPVKVFDRTCGIDQNSGFITATIIDKHANPVNKLTLEHSHSKDISALVSKLVVWAMNNGVYRFSIEKLKSLNYKKRKSNGSSSGLNRIVSRIPFGEFKECLNTITSSYGLQVVEVNPYNTSKNTKYWNEDRFGVTVHEKASYLIARKSLGLSILRRDHFNDYPEENRVSWRAISLNDGSILHNSHDNSLVDSDRVVGCGS

SEQ ID NO: 1927 - protein, 536 aa, synthetic construct
  REGION 1..536: note = Synthetic
QMFTYQTRLTVTPAQDAMLSRLAALYSRVERHLFVAQQQGKLTQNELKQTYQTRFGLNSRYFNSINESIRGKILAIQELKALHVSELQSKIAALKKQLKKLSTQPVTSAHRFAWHHKNRRLIHLERKLTVVKKSQDSERVSLCFGSKKLFRQQFQLAKNGFDSHAAWLAAWQQARNNQFLLVGAGCETACNQNCQISAQDETHYALKITLPASLIGEQGKQLHLTDIRFPYGDAVIRAAMDSSQRIATVSNTGKPISKLTGTPITYRFLKDDTSWRLLVTVGQTPLPSQTSVLAGAMGIDVNVDHLALAETDRFGNLIDAARLPLVTYGKSTNQSRALIGDAAKHIALRAQAAGKPVVIEKLDFKRKKAELETDNAARARCLSSFAYGKILSSIKAACFRAGVVVIEVNPAYTSVIGAVNYAQKKGISVHMAAAFAIARRGMRLSELPPTRQVCVPTRNGDHVTFVLPVRDNTKHVWSTWSKIRTALNTAHVAHFRRGERSSSPPPLREHPSLRAVWKSQVNRTQICPECVLDIPF

SEQ ID NO: 1928 - protein, 480 aa, synthetic construct
  REGION 1..480: note = Synthetic
LTRTFQTRLRLTSEQDAVLSAFCAAQNKVIYTLLNQLQKPKNSSVTLKRDYLPRFQINARHFNSARVVAAGMLSSVAELNEFYIKELQIKIDAVSRQIKNLQDPKVPKKLTVQRINYLIHQKKRKKHRLELKLLKKKNKNHTSVCLGSKDLFHKQFNLEENGYKNHAEWKKEWQQARNNQFTLIGSSDEVCGNSIAQLKQSASHTFQLRLTLPEAIFAQFPAQHKFFSLDNIAFAYGEQEIIQALQNTYVDPARPKVKKQTAMTYRLMRDEKSWRLMVSFAENKAVESRIDRGAVGIDVNIDHLAYTETDRFGNWIDSVRFNFQQDLPQGKNKAQLQELAAKLVHKIKQTGKPLVIEKLDFSKKKAAMLAEPDPKKNKMLSGFSYALILQSLKTACIKQGVEVIEVNPAFTSVIGAINYAQKKGISVHMAAALAIARRGLRFQSAQCVNRRLCLCATAAMSPLICRSGINQSMYGRIGVS

SEQ ID NO: 1929 - protein, 393 aa, synthetic construct
  REGION 1..393: note = Synthetic
VRICFGGRRLFRRQFHLEDNGYRDHEQWLEEWRRARANQFFVVGSSDETGGNQSCVATVAEDGTLRLRLRLPPALAHEYGKYLEIGGIRFRHGHQQIIAALESITIKTTTSCGRRVTKRIGRAISYRFLRDEKSWRLFVTVDEDLPPTATWRELGAIGVDVNVDHLAVVETDGDGNLVEWWLIPLRLRGKTSGERRAVIMQACARVAELARERGLPVVIEQLDFARKRAELEGVGADRARELSSFSYSQILDCIDRACCRRGVEVIRRSAAYTSVIGAVNYATRYGVSVHVGAACAVARRGLGFAERPVGSEARVPTRGGRHVTLLLPARNRGEHVWRFWACVLRALRAVHGAHTECDRRSPPSGQIVDPPGACRLGVSGEIPERESSTEPFG

SEQ ID NO: 1930 - protein, 539 aa, synthetic construct
  REGION 1..539: note = Synthetic
SIFTYQTRLQNLSIEEIATLDKYCALQSKIERKLYAKIKTNPSNRNEIKRQLIEQFGISGRMFNSIAMTLDGKTKSIKELLPGYIDKAKSDIAKKEMQISKVLAKKSLNKKQLFSLHQMQRRLAILHLRLDRLTKQKEAKDYAICFGTRKLFHAQYNLEAHGYASHQEWQTAWRAERSKQFFVVGSKDESAGNMLCQLSEQGDTLTMKLRLPDSLNLGKHLNISKIDFQYGKDQIQKALRSSHRKQREDGKGTVRDGTALSYRFVKDKKGYRLFVSVDVTAPELLTNRNLGAIGIDLNADHLAVSEIDYRGNWIFSQRHDLPILGKTSHQASAMIGDEVAKMIELATMSCKPIVIEKLDFQKKKRDFNQYNPTGARMLSSLAYNKILQTIKAAAFRAGVEVIEVNPAYTSVIGQVNYAQVYGLSIHLASAIAIARRGLGFSEKLASRNGLVPIRNGSHLTFSLPVRNRKKHVWNHWQAIRKSVTAAHKAHARLGLSKTNPKPLRSIRPLGSSYCVLGTQFPYASRSLLLDGDIDSTIPY

SEQ ID NO: 1931 - protein, 325 aa, synthetic construct
  REGION 1..325: note = Synthetic
LNLGKYLNISKIDFQYGKDQIQKALQSSHRKQREDGKGTVRDGTALSYRFVKDKKGYRLFVSVDVTAPELLTNRNLGAIGIDLNADHLAVSEIDYRGNWIFSQRHDLPILGKTSHQASAMIGDEVAKMIELATMSCKPIVIEKLDFQKKKRDFNQYNPTGARMLSSLAYNKILQTIKAAAFRAGVEVIEVNPAYTSVIGQVNYAQVYGLSIHLASAIAIARRGLGFSEKLASRNGLVPIRNGSHLTFSLPVRNRKKHVWNHWQAIRKSITAAHKAHARLGLSKTNPKPLRSITPLGSSYCVLGAQFPYASRSLLLDGDIDSTIPY

SEQ ID NO: 1932 - protein, 538 aa, synthetic construct
  REGION 1..538: note = Synthetic
PVFAYQTRLRLAAEQVAALDGYADLYGQAERALFARMRVGIPMGDLKCEFQRRFGITARQFNAIRVGLEGKIASIRERLPEWIAEAESRIQKAERVVRILSAREPGSEKLHQKKRRLGSLRARLTARIADRDSGRVRLCFGSRRLFRKQFALEENGYASHAKWKEDWQAARSSQFFVIGSKDETAGNQSCRASVEEDGSVTLRLRLPDALASDGKLLVIPGVRFAYGQEEILHALAASRVVFSQTKTGKPVRKREGVAVSYRFVRDRKGWRVFASVPARSVPMATSRLAGAVGIDINHDHLAVAETDRFGNLRRALRVDLNLYGKTEDQAKAIIGDAARMIVEMARERGLPLVLERLDLKKRRAELEVASPSAARKISSFCYSKTIAMLKAACFRAGVEGIEVDPAYTSVIGAVNHARRHGIGSHQGAAYAVARRGLGFSEHPTVREAVAPARNGGHLTFALPARNRAKHVWSFWSEVRRRLKAAHAAHARSGGLREPPAPLLPETRALGATWALPAESRHANRRQNCSADVIDDLPW

SEQ ID NO: 1933 - protein, 547 aa, synthetic construct
  REGION 1..547: note = Synthetic
RLYTYQSRLALGAGQSAWLDAYAALYGRAERGLFAALQAGSSDLNALKREFLVRHGLTARQFNAMRISLQGKIDSIVVSRAERVATLTRQIRHAVTVIGRLEEQAPGSARLHQKRRRLGILHARLDQIQADQKAGRVRLCFGSRKLFRAQFALAQNGYASHAEWKADWQAQRDAQFFVLGSKDETAGNQSCQASVEEDGTLTLKLRLPDALAAEGRYITIPGVHFAYGHEDIVAALLSSQRVQIQTKHDKPAYRRTGTAISYRFVRDVKGWRVFVCMAVRAPVRTTHRQCGAIGVDVNADHLAVSEIDSSGNLVRTLRIDLATYGKSRQQAEALIGDACVVIAEFASAAGKPVVHELLDFARKKAELEATGARYSRMLSSLSYSRIITNIDSACFRRGVETIAVNPAYTSVIGAVNHAKRHGISVHMGAACAIARRGLGLSERPVVRSGHVPARGSGHVTFALPVRNRAKHVWSLWAGVKRSLQAAHAAHVRSDRERAKARSRSAPSAPATRPMGAIQTSGVRSPGANRHQHCSGDVCSNPRGCAQG

SEQ ID NO: 1934 - protein, 359 aa, synthetic construct
  REGION 1..359: note = Synthetic
IDIETQEKAHDARICFGSRVLFRKQFNLEINGYHDHADWLQDWQSKRNSQFYVLGSGDEETGCQGCQIVENENGTFNMRLRSLSKEASYLTISGIDFKYGSDVIRSAIANNIDAKVTRANRDMQVRLNKKRTAEAESLHIDPVLIDVIPAVLGQALSYRFIRDDKGWRIMITTDLPDFERISVEGDGYVGLDLNADCITMAETNRHGNLLKSKVFPLVTYGKNTNQAETLICEVAKQIVDYAASVKKPICMEKLSFKNKKADLSKENPRQARMLSSFSYNKIIQAVKTRAYRFGIVTKQVNPAFTSVIGLINHSKRLGISVHQAAAFVVARRGNRSILFLHPGGTVYVVSHLVPAGNNP

SEQ ID NO: 1935 - protein, 513 aa, synthetic construct
  REGION 1..513: note = Synthetic
HTSTYQARIAATEDVESVLDAYAVHYGHVERCLYADMRKSGKKAVALKNDYLVRFKITARQFNAIARNLAGKIDSVKELLPLRIQETELAIARAKKVLGRLKNKNKIHQKKRRLANLESRLAAVISQKESENPRICFGSRDLFRKQFNLEENGYSFHKDWLADWQAKRSSQFYVLGSKDETAGCQGCVATENPDGTFNLRLRLPGFLVEEEKYVHLRDIRFSYGGEVIRQALRCGQAISYRFIRDDKGWRVMVSTDFPKIKTISFRQAGAIGVDINEDCLAVSEIDRYGNLAGTCVISLVTYGKSTNQAKAIIGDVVKEIVAQAIEARKPIVIEKLDFKKKRAELEAEHPGQARMLSSLLYNKIIQQIHSAAYRAGIEVIEVNPAFTSTIGAVNYAKSCGISIHQGAAIAIARRGTGFRERPIKAVEATIPTAKGDHVTFPLPARNRGKHVWSFWSDVRKIQKAVLAAHLRPPKGEPGKRNPSQGKVPRFTVRPRDANHRQHCSVGVMDDIPW

SEQ ID NO: 1936 - protein, 514 aa, synthetic construct
  REGION 1..514: note = Synthetic
QTFTYQTRFDAPKEQDAALTAYAALYGTVERNLFAALAAGGDASSLKSAFLRRHGITARQYNAVAINLKGKMSSVKEQRAVLINELDARVKKARKVIAKSKNPNKRHQKKRRLSNLLNRLAGLETEKKAEAVNICFGGNKLFRKQFYLEENGYSSHAEWKHDWVKARSNQFFVIGSKDETAGCQGCVAGVQPDGTITLRLRLPDALASKGKYLVVPDVHFSYGQDVIEAAILTRQAISYRFMRDEKGWRVFVSTSYQAPERISDRGRGVIGIDINAGHIAAGETDRFGNFINAARYDCVTYGKSSGQAKAIIGDAVKQVVRDASMAGKPVAIEDIDLKKHKAEMENESPRACRGLSSFAYMAIQNTIRAACYRAGIEVIDVHPAYTSTIGAVNYAQKYGISVHQGAALAIARRSMGYSERPSVQTAVTPVCNGGHVTFPLPARNRGKHVWSFWAKVRMKLKAAHAAHARLGYPKPLRLYYSPAPGSRRALPESPRHVNRQQNCSADVLDDILVQ

SEQ ID NO: 1937 - protein, 401 aa, synthetic construct
  REGION 1..401: note = Synthetic
MKTDLAEGRVRLCFGSRKLFRMQFNGPVAGDKAFQKAWQADWQASRSAQFFLVGSKDETAGCQSCVATVQSDQQLTLRVRLPYALGKHQVLQNIHFTYGNEAILASLKAQRALSYRFVRDDKGWRIFLSTDHDDVRIKTRRDLGAIGLDLNVDHLALAELDRSGNLIHAEKLPCHNHGKSTEQAKALIGDLAKAVAARCAAAGKPLVLERLDFQARKKALAEHNPREARILSSFYYSKMGSALRTACFRAGVEVLDVNPAYTSTIGAINHAQPRGISVHQGAAMAIARRGMGFSERLSTRVGLAPARRGGHVTFALPARNRAKHVWSFWADSRKNLQAALAAHFRSGASKDNPAPLISPICFVPTRRGLAKTVCSTQKLSVKSRHARYPNCSGTVLEDVPF

SEQ ID NO: 1938 - protein, 276 aa, synthetic construct
  REGION 1..276: note = Synthetic
VPDALIAFNGVEKYLFIHNVWFERGQLEIYEAMANGVAISFRFQRDKKGWRILASTEREDFRKEFSAQIGVIGLDLNVDYLALTETDWFGNLRTVGRVPCVLQGKTSGQRKAIAQRAAVEAVAYAEHAGKPLAVEKFDFAKKKKQLASLKGDPRLRRRNRQLNSFAYGAIIQSVHGRALQESVPVKEVNPAFTSVIGRIKYAKRHGASVHQAAALAIGRRGMSYSETVPVRGQIPDGKDDHLLVKFPARKLSAHEWAHWGRISNAVQAILSEWHRL

SEQ ID NO: 1939 - protein, 531 aa, synthetic construct
  REGION 1..531: note = Synthetic
QATFQTRVQLGGHDMAVLNRFAGLYALVEHELFAAYSRTGEVRAMDKLKSTICAKHRITARQFNAVSVFLKGKISSRQEVNKSALAQVREDLKAVRRSLAKLLKCAGPLDATQRRSWAAKKRRLARLEAKELELSTGRVALCFGSRKLFRAQFDLAASGFRDHAEWLSAWRDARSSQFCLVGSKDEASGNQSCTAAVAENGTFSLRLRLPDALIEHPGEKYLMLHNVWFEHGQWELLAALDEKQAISYRFLRDDKGWRVFASTARADYRSKPDLQLGTVGVDINAEHLAVSEVDRFGNLVHRFSVPCVTHGKTARQRQEVVRSAAKAVVGYAAKVGKPLVHEKLDFSRRKQELAGDRRNAQLSRALSSFAYSGFIQSLQSNALLMRVASLEVNPAYTSVIGRVKYAKPLGVSVHQAAAMAIARRGMGFGEAAPRRPVIPDGRGDHLIIELPARNRSMHEWSHWAKVRSKVQGTLAGWHRLRRIAALEAVQVVNAARVASRGQSDAGAVRARPPNRQLHRLAGVRGTNVHGI

SEQ ID NO: 1940 - protein, 235 aa, synthetic construct
  REGION 1..235: note = Synthetic
VQKSAGCQGCQLAPQGDGRYAVKLRLPNALLDPERHEETHVRFEATFAHGRKAIDVALGAGIALSYRFLRDAKGWRMLVSTDVQGAVRLNHRPGALGLDFNADHLALTEMSGDGNPVRILRIPLVTYGCSTEQAKARIGDAVKQVIEAALAANLGIVIEKLDFMAKKRALKDQGTRYARMLSSLSYNRILELVKARAFDAGIQVQEVNPAYTSILGRQKFAQRYGLSSHGDLCII

SEQ ID NO: 1941 - protein, 503 aa, synthetic construct
  REGION 1..503: note = Synthetic
TRTYQSRPVLSPEGEALLGQYAAIHGQAERALFAALAAGANPGTIKPTFMVLHGLTARQYNALAAAVKGKVRSLQEIQKARITDLTRRIEGLEARLSKLPKGSNKRHQKARRLGILQQRHADLLADRTAGRIRICFGSRKLFRAQFALAANGYADHAAWLKDWREARADEVFIPGSKDETAGCQGCQMTPLGDGRFALKLRLPNQMAEHAKFLTLEATFPHGANRLEAALAGEQALSYRFLRDEKGWRVFASTAVEAGGAMQAVAGALGLDLNADHLALAETDGDGNLVTIHRIDLITYGCSTGQAKARIGDAIKQVIGIAQEVRKPLVTEALDFTRKKREMKDSGVRYARMLSSLSYARILENLKARAFDAGIPVHEVNPAFTSIIGRSKFAQRYGISLHGSAALVITRRAFRFSERPNPSRGHGTSPAPVRKRGEHVWSFWGKTLRRERRLQRTSGRSRAIPPATGPAKGTGAGGTNPGVPGGIPERESATSTVRGASNGK

SEQ ID NO: 1942 - protein, 310 aa, synthetic construct
  REGION 1..310: note = Synthetic
LRLPNRLVAEYGKYLVTTVHIAYGAAHIEQALATQQAISYRFKRDEKGWRVFVSTEEIAVEPLSDRRTGTLGVDLNADHLALALSDRFGNLIAAERVPMVTYGCTSEQAAAKIGDAAKRAVAVAASAGVPLVIERLDFARKKAAMREQGARYARMLSALSSARIEQTLCARAHDAAVAVLFVNPAYTSVIGRQKFSRRYGISGHLSAALAIARRARGFSERVSRHGQVAFDVPARKRQKHVWSSWALIAKGERAEHAARRQSQRTQRGDPPPASTANAPTTASEVTHLSSTGGIPVRESVTNTVRVASVS

SEQ ID NO: 1943 - protein, 514 aa, synthetic construct
  REGION 1..514: note = Synthetic
KVQRTDQTRIADPEGTAGAVLDAYADLYGRAERALFAAMRRGVAPGALKSEFMARFGLTARQFNALAINLKGKIASIKERRDGLIDEAKARIKKARQVVAKLDKALAKPIEAAARKRLLNKRHQKQRRLATQHARFVQLEADRDAGTVRICFGRRKLFRAQFDLEANGYTSLDEWRADWQRARSSQFFVIGSKDETGGCQGCVGEYLGGQRFALRLRLPPALCASGEKYQRLEIDLPYGTDQLVAALTLEQAVSYRFRRDAKGWRVFVTTQALPFTLASDRRLGVIGVDLNADHLAVCETDHFGNPIAALTIPLVTYGLDRDQTQAAIGNAIKSLMEFARDKGKPLAIEKLAFAQKKAALEDEGPRHARMLSALAYARIGATLRARAHDAGLEVIARNPAYTSVIGREKFAGRYGLSPHHAAALVIARRALHLSERPNRRARTARPLPARNRGRHVWSFWRQVAQQQRRMYRAGSRSQDRSRSPPALRGAARAETLLPAAGATPARESSAALFG

SEQ ID NO: 1944 - protein, 528 aa, synthetic construct
  REGION 1..528: note = Synthetic
MRTYQARLTVTDEAPLRTYGAVFSRALRSLHTSRHSGMVVSKPDFMRAFGLTSRQYNAVKFSLDGMESSIVELRPGRIADLQHRIKAADRKLAKLLDPQPPRKASKRSVRKERAPRTFEEQRAQAARATASRALRIHNVERRRTDLARRLEALEAKGHPRICFGSRKLFNAQHHLEENGFNSHADWRAAWRAKRDAQFFVLGSKDESGGCQGCVMTHLGGNRFALRLRLDGQAQRWISLEVAFAYGLDHILAALKAKQAKSYRFLRDEKGWRVFVSTEVMPTPTCSDVRLGVVGVDFNVGFVSVSETDRFGNIIGSQDVPMVTAGLSKHATQTAISTAVATIIAIACKAQKPISIEFLDFAKKKAQLSYASPSRQRMLSAIAYTRFAQTVDARAHDAGIEVVEVRAAYSSKIGAQKYARRYGLSGHRAAAFVLARRGQKFPDRLKPSSRKRFATTCKDRGEPVPDRLKATSGRGRARLETYVRPPVRAILAAPRGRKRSATETSDVPRCKSAGVIATPNTRCGVGGYS

SEQ ID NO: 1945 - protein, 501 aa, synthetic construct
  REGION 1..501: note = Synthetic
AALDERLVGYAALHSRIERTLHADLERQAASGVKPRAEDFKTAYCSRFQITARQFNAIAMSIKGRRASITEINRERVKSLSLGIRRAQEKRRLALKSGKTLRAAQLHDKVERLRAQQTRLKADLTAHRVRMCFGTRKFFNAQLSLGAGSIATHEDWRRAWQSARSSQFYCLGSKDESAGNQTCTARQAEDGSFTLRVRLPDALIKAGEDRYVIIPGVRFSYGQEDIEAGLERGSALSYRFMRDAEKPGRWRVALTLDVAREAPSSIDMLGRIGVDVNVGFLLAVETDRFGNKVRSQRLSTPERGLSAHQREAARGEAIKALISWAHETSKPIVLEDLDLARKKSGRSADTNRKISALAYKALRDQIEARAADAGVLIHVVNPAYSSVQGRTLAVQHGLTTHGGAAFVLARRSQGYRQRLPKVGSRRRLPTPDGLIWWSAPARMHSGGRTDWTVIAADISQVLAAQYRSRALPAKPSGPARVSESILPGGIPGLEGVARPHP

SEQ ID NO: 1946 - protein, 601 aa, synthetic construct
  REGION 1..601: note = Synthetic
QPRTYATQFAPSSAAGEALVGYAQVFSQAVRTAYSALERAARTGQPLGQAAHKLELAHRFGLTSRQAGSVLVEAQGRRDGQLELQAMNLDDARSGLARHKAKAARCAEQLAAHREGTTLRLRPKKAARVRSALFHASTRVQALTAAIARLTPRVAQDRTSMTFGTKKLARQRAALLIALEQGLEAPDVAEQQLAEVDAAWDLRRNGQFLVVGSRDETAGCQGCICTVGADGRFDLAVKLPNALGGERLVLPGLTFKHGAAQLRHALAQPARRAAALKVEQAKCDKARADARARGEDPDVRLAPTDKEREAGKEPKLRYPPKPSGKVVLGGAALTWRFMRQADGRWEVSFTTDVVGPEVVTDLARGAIGIDLNSGFLTMAETNAHGSILSSVVVQTPEIGLDANQRADARGCAAKVVIARCLRTGKPLALERLDFRKKKQSLAQRSPGSKRKLHALAYNNIQELLRSRALDAGVEVIDIDPAYTSTQGWVCYAAARGWTVHQAAAGVIARRAQGFSERAPVSGVMRLPVAGTAVECEVPAETSRSDVSKRWPLLHRCASQAIASHHRQRRRAADPAARTGESVVLGEGPKLNRTRHGPRCAG

SEQ ID NO: 1947 - protein, 536 aa, synthetic construct
  REGION 1..536: note = Synthetic
HRTYQTRLKSLTSETEAALSSYAAIFSKAERTLFAQTFAQGIRPTQVHKSGFQSRFGLTARQYNAILSGQGKVESIKELRKEHIQAARERVKNAEKAVKSLERRLKADRKTKAATVDKTAFKLHHKKRRLVTQQHRLEKKLAEQASGKVSLCFGSRKLFHAQYNLEENGYKNHGEWKQNHGEWKRDWQSYRDRQFLVLGSKDETSGCQGCQLKRIEGQWFLYLRLPNSVLEQTGLNKHIVLPIELPFGEVAIEQALQRGNAISYRFLRDKKGWRVFISTEVKASKIKTIEAQGAIGVDINAHHLAVVEMDRNGNPINKHRINVQTCGKSTHQRMAVIGDAVKQLIAIALTARKPIVLEELDFTRKKRDLKANEDRRYNRMISSFAYRKIIEVIKARCLDHGIEVKDVNPAYTSQIGKHKFSERYGLTPHQGAALVIARRSQNYREQPNREDQTASWLPVRKVQEHVWSYWRKVSRQPVAYATLLSKRKQSRSAAQSEGTDSKMVSNTSGVSDWVLIRSLTVGNTVRPAIWNIFPYN

SEQ ID NO: 1948 - protein, 475 aa, synthetic construct
  REGION 1..475: note = Synthetic
EGGPPVPPTSAPGLVRASGPGRAPIMQRTYETRLPSDLARDPILDAYAALYGRAERTLFARLRAGEPLAALKRECLVRFGLTARQFNALAADLQGKISSVRKRRPGLMRSLERRIARAREVLRDIPRGTDTYHQKRRRLTRLAQRLQTLRADEASGRIRLCFGSRKLFRAQFTLSATGYASHEAWRRVWRSARSHQFSVLGSKDETAGCQGCVATVETDGSITLRLRLLTRSPHGKYVLIPGLRFRYGRDCRHLSPTKEDWQAILWRFVRDRRGWRVLVTVSVTPGEWSSVDGGGVVPVDLNATHVAVTELDRFGNPIAAVRVPCATRGKTFPQVRAAIGEAVSQVVTSACLGWKPIVADRLDFEKKKAELDQRGARDARLLSGFAYATFHAMLSARCYDAGIALQRVNPAYNSVIGTYTFADRSGLSRHQAAATSIGWDASLSPAREPPALLLGSCVWTVRKRPESQERCTAPG

SEQ ID NO: 1949 - protein, 509 aa, synthetic construct
  REGION 1..509: note = Synthetic
KQQRTYQSRIAPLPEEDNLLGAYAGLFSKAQRTLFAKLQAGGEVASLKRQFLPQFGVSARQFNAMSAELKGKISSIKERRPGLIKESEQRIARAKKVLKKITNPAKLHNKKRRIEALQTRLDHMKADHTDGKVRLCFGGKKLLNAQFHLQDNGYANHDEWLADWQDKRSSQFFVLGSKDETAGCQSCVATVAGDGSITLRLRLPNALSKESKHITFNNIRFEHGHTEIVSAIGRNLSNNKDDWQAISYRFLRDDKGWRVFVTVAVPEVKKISDSRLGVIGIDINADHLAITETDRFGNPVECFTVRCVTYGRTSEQRSAIIGDAVKQAMAFAVDRGKPVVIEKLDFQKKKSALESQAAQYARILSSLAYTQIQTTIRARAFDAGVEVHEVNPAYTSVIGQYKFKDRYGLSAHNAAALVIGRRFLGFSETLPSQLHGTLSLSVRNRDRHVWSKWAAVSRKTSAALAARRRSELSRSSPSPVCSMGQGTACDTSAWTGEIPVCESSQELFV

SEQ ID NO: 1950 - protein, 573 aa, synthetic construct
  REGION 1..573: note = Synthetic
ITLHTRIRNLTPEQDAALSTYAERFNRVAHHLATDMAKEKRTGASFKKAYLRRFTLTARQFNAICLSVEGLASNRLENLKNQENMLSDKILALQKLLPKIVLQIQKAGAEQKPDTVIQRLKNRLHQKKRKLVNLLERQSQVIHEQQRPLGSGLCFGGRKLFHAQHHLQENGYQNHAEWLADWKLARSRQFFVLGSNDETAGCQGCVARIQSDGTFLLDLRLPGTEEKRVTIGPLQFPYEAEKLRNVVALHAQLSKENLPRITKQSKAGKPYSRIVYPEALSALSWRFQRGKDQKGWRVMVSFQQPLQGANPAAAVQTHIQAGAIGVDLNADHLAWAELDRFGNPLETGNIPCVTYGKTATQAEALIEAAAIALTQRAKQTGKQLVLEKLDFSQKKTQLSEVDGPRYARMLSSLSYRKIHDAIAARAAKDGVEIKTVNPKFTSVLGRINYAARYGLTVHQGAAVVIGRRAFDRFAKNPHTGKNFKEFGLREMPIGRTGRDGRKTITAPDGRGAQVTFSYPAWNEQKHVWTLLGKVSRKMKAALAAQRVAGQSDHPERMVKSARRKPEVPVAAAV

SEQ ID NO: 1951 - protein, 267 aa, synthetic construct
  REGION 1..267: note = Synthetic
MVSFDEPKAAITADVKTGVLAVDLNADHLAWAERDRFGNPVATDGIPCVTYGKTTQQAVAIIEGAAIKRIQHARHVGKPLVLEKRDFTRKKGQLTEEDGARYARMLSSLSYKKILDARNARAVKEGVAVKMVNPAYTSVLGRINYANRYGLTVHQGAAMAIGRRAFDRFAKNPRTGKVQKVFGLRETPIGRTGRDGVKVITAPDGRGAQVTFPYPEWNARKPVWTLLGRVSRKMKETLAAQRMAEQLDPPQRMGAARPPDTPVVAAA

SEQ ID NO: 1952 - protein, 484 aa, synthetic construct
  REGION 1..484: note = Synthetic
SISTFQTRIDSYPALQAYADRHNLVEHKLYAQILAGKKPNKLKQAFLVKYGITARQFNAIERNLRGKISSVQELRKDHKKETNYRIKDCERKIEFVKDNLKQHNLKRRLHGLKTRLARLEQMPKSLCFGSRKLFNSQFGPEIDHDVWSSDWKQSRSSQFYVLGSHEETSGCQGCVATVQDDGSLTLRLRLPDALMAIHGKYIEIPGVYFNHGHEHVLQALALGNTPTNYRFKLDGIGWRVFVSVHVIEAKIVTRDSLGRVGFDLNEDHIAVTETDRFGNIINTFNEPVITTDLTTHQTLAVLGNAVKNIVAYAKNVQKPIVIEKLDFQKKRAELRGRGQTAKNLSSFAYSKFRSIVVSRCQREGIKVYNVNPAYTSIIGRNKFALRYGLTVHNAAALTIARRSMGLSENPNKKCYQGTSFLPVRNRTEHVWRYWAKLAKAQARDWATRSSKPDANHVSCDSRKPALGPISDSLPVYCSGNVTHS

SEQ ID NO: 1953 - protein, 522 aa, synthetic construct
  REGION 1..522: note = Synthetic
RLTATYQTRVREYSGVDREAGDAALSAYAELYGRVERKLFADVAAGRSAGSLKSECLQRYGIPARMFNAVRVSLEGKVASVKEQQKPQLDSLCRRIARAERQIAGAAEHGRWDQVHQKRHRLANLQSRLAALETDTEEARVRLCFGSKRLWRKQHNLETNGYASHQEWLKDWREARSDEFFVLGSRDETGGCQLCVASVADDGTMTLRLRMPDCLATQHGKYLAIEGVRFAYGHEQVLAALDSNAEYRRYRGEHGDKAARATTLSQAISYRFKRDRKGWRVFVSTQMMDVPVVTDQRHGAIGVDLNVDHLAVCETDSSGNYINAFSVPLVTYGKSQHQAEAIIGDAVASVVEHAREVGKPIVIEKLDFRRKKATLEGESHRYSRMLSSFSYGKIKAYFLSRGNRQGVEVHQVSPAYSSVIGRVKFMERYGLSVHQAAALVLARRLLGCSERIPRRWVCPVGNDVQVAFTVPARKRVKHVWTHWGAISGQLRPALAAQHRLGKRRRRPNPVQAVARGETRGVA

SEQ ID NO: 1954 - protein, 517 aa, synthetic construct
  REGION 1..517: note = Synthetic
QHPGTYQTRVAEYADVERQAGDAALSAYGELYGRVERKLFAEVAAGQSAVSLKRAYLKRYGIPARMFNAVRVSLEGRMASVRAQQPLRLDSLDRRIARAERRIRAAAGCGRRDQVHQQKRQWAALQSQRAALQEDLETGRVRLCFGSKRLWRKQHHLAENGHASHQAWLRDWREARSDEFFVLGSRDETSGCQLCVASVADDGSLTLRLRLPDCLAPQHGRYLVIQGVRFAYGHAQVLAAMESNAEYARYRRKHGEKAVRATTLGQAISYRFKRDQKGWRVFATTNMMEVPVVTDKRRGAIGVDLNAAHLAVAETDASGNPVNAFRVPLVTYGKSRPQAEAIIGDAVARVVAYARETGKPIVIERLDFRQKKVELEGESRRYSRMLSSFSYGKVKACFLSRGYRQGVEVQQVNPAFSSVIGRVKFMERYGLNVHQAAALVLARRWLGCSERIPRRRVAPVDHGVQVAFTVPARTRVKHVWTYWGAVSGQLGPALAAQHRLGRRRGPPNPVQAARRVA

SEQ ID NO: 1955 - protein, 538 aa, synthetic construct
  REGION 1..538: note = Synthetic
SSIRTYQTRLRLDETTDKALLACAELFAHVEHSLFRDVRAKKSPKDLKSQYLKKYGITARHFNAFRVKIEGKIASIQERCQSLISEISEQIKSVEEKLSQPKRKKSPLFIHQKKRRLHQLKQRLQKLQHQQEKGNIALCFGSKKLFRAQFNLEANGFKNHEEWQTAWRFERKNELFFLGSKDESGGNQSCTLSLEEDKTFSLRIRLPDALITKFGKYLRLTNIHFAYGQENIIAGLIDCRQRQLLSQVKDPNYRNHGQALSCRFKRDKKGWSIFVTTTLPKPQWKTDKNRGVIGVDINTDHLALVETDRFGNPLIKETIPLNLYGKTQKQALALIGDACANVIAHAEKTLKPVVLEDLDFQKKKRQLREKSTSFQARKLSSFSYQSILTHIKSRGWSKQIEVYQVNPAYTSLIGRVKFSNRYGLSIHHAAALCIGRRFLNFSEKIPRHLEKIPDGRNGHVALSLPVRNRDQHVWTFWRSLSKKLKVALAAHFRTQRSLSTLKAALETGNLPDLVGETPAHESSTQLLGWRLYEKCTFA

SEQ ID NO: 1956 - protein, 303 aa, synthetic construct
  REGION 1..303: note = Synthetic
LIDCRQRQLLSHLKDPNYQNHGQALSCRFKRDEKGWSIFVTTTLPKPQWKTDKNRGVIGVDINTDHLALVETDRFGNPLIKETIPLNLYGKTQKQALALIGDACANVIAHAEKTLKPVVLEDLDFQKKKRQLREKSTSFQARKLSSFSYQSILTHIKSRGWSKQIEVYQVNPAYTSLIGRVKFSNRYGLSIHHAAALCIGRRFLNFSEKIPRHLEKIPDGRNGHVALSLPVRNRDQHVWTFWRSLSKKLKVALAAHFRTQRSLSTLKAALETGNLPDLVGETPAHESSTQLLGWRLYEKCTFA

SEQ ID NO: 1957 - protein, 513 aa, synthetic construct
  REGION 1..513: note = Synthetic
NLLTFETRTELDLLSLEILDEFSDLFSHLQHRLFADIACGNIAGEVKNDYLIAYDITARHFNALRVQVEGKISALKTQLVNRIADTKEKIASLTKTIAKFIKRQAKPHVIHQKKRRLAHLEQKLAKALEDQKNGTVRCCFGGKKLFHAQYNLEANGYSSHEEWRKDWKKARSGEIFFLGSKDETAGNQTCTATLQPDETIQLRIRLPKALEKYGKYLVIQGIKFKYGKEELQALLKSETPQAITWRFKRDEKGWRIFSTFAVEPAVCTSKQDIGVIGLDINADHFALVETDPNGNPISTETIPYNLHGKSSAQAKAIIGDAAASAVAFAGSKNKPLIIEELDFRKKKSELREKASASYARMLSSFAYNSLITHLKSRASKQGVFVSQVNPAYTSIIGRVKFAKRYGLSIHHAAALTIGRRYLRFSEKVPSPLGEIPDGKDSHVTLTAPVRKRDEHEWSVWSRLSKKLRTALAAHFRTAKSRSKSPPKTAFETEPISDDVGETPTRESLEPLFA

SEQ ID NO: 1958 - protein, 503 aa, synthetic construct
  REGION 1..503: note = Synthetic
RTFTLRARPHLDEKQHEVLNECGKLLSKVTRALFASLCKGISMNELKRQFIVQFGITARHFNACRIQLEGMIKSKKTSLPMQIASLDWRIQNLEKKLKKQKNPFSVHQKKRKLLHLKRKQDQLEADRKSSVKRLCFGSKKLFHKQFYLEENGYKNHQAWRATWQDARNNEFFLVGSKDETAGNVNCVATLQQDQTFTLRMRLPNALKEFGTYLYLQDVSFAYGHDYLMEALRQKQAISFRFVRDEKGWEVFASIALKEPQWISDERHGVIGVDCNTDHLAIVETDARGNPIAKHTLPLNLYGKNKKQRAAIIGDTCAELVELARQKQKPIIIEDLDFTNKKTALHSAAGARTLHLFAYSAIRETLVSRAWRNAIKVHTVNSAYTSVIGQVKFKDRYGLSTHHAAALCIARRFFGFSEQPTRCLIKFTDNKGVHVAFPLPERNRGKHVWTLWSKVAKEIQAVHEARFRATKRRSKVPPLPNHKIYTLESLGEIPKCEPLAELLG

SEQ ID NO: 1959 - protein, 529 aa, synthetic construct
  REGION 1..529: note = Synthetic
KQVTYQTRIKADAKLDEILTMYSTHLSMVCRNLFKDLISNKKINELKKEYIKKYKITARQFNSCRLEVEGKIKSYNELRKNRISSLKQKIKFLEKKIPKYKNLKKIHQKKRRLFNLKTKLQNLEKETKPKLCFGSKKLFNKQFYLEENGFKNHLDWKKTWQENRNNSFFLVGSKDESSGNQTCQIQKKDKKFSITLRLPNKLSNIGKTIIIDDITFSYDKTKIIACIENNLKRKVLQKQKNLSYKLFGQSICYRFKKDKKGWRIFITLDLFEPLWISKKENGVIGIDINSDHLAVVETDRFFNPINSKRVPLNLYGKNKNQALAIIGDASAKIVKDSITSKKPIVLEKLDFQRKKTTLKEANTKHSRMLSSFSYNAIINTIKSKAFRSQIEIFEVNPAYTSVIGRVKFAKRYGLSTHLAAALVIGRRSMKCSENPPRSLVKIPDKKGSMRAFFLPVRNRKKHLWSFWGKVFGILKAVDAPHFQATNSRSSNTPLPIEIEILENCERNSHTLTVDKTARSTSLKKSLLHV

SEQ ID NO: 1960 - protein, 287 aa, synthetic construct
  REGION 1..287: note = Synthetic
MQSQYGKYVEIQDISFSYGQSEMITALNNPQGKAISYRFKRDAKGWRVFASFGIEESKTISCEEIGVIGIDLNADHVAYTETNRFGNPISKKIFSWVSYGKTNEQLKAITGEICKEIIDKALSAKKPLVIENLAFQEKKGTLRGGYNKFSRLLSSFAYGLFFKMLQARAFKHGIQVHKVNPAYTSTMGCVNYAKRYGLSVHLAAALCIARRYQKFSERPNSATGIIPDGKGGHVAFALPERNRARHVWHFWGRIKKKISTVLAAHYRAKYNRSSSSLKSTRETGNSR

SEQ ID NO: 1961 - protein, 571 aa, synthetic construct
  REGION 1..571: note = Synthetic
VPISTYQTRLKNQPDAVLGALDDCAELLSRVERQLFAQSQKVDTFKGKVFNQIKSFFLSFFGILSRHFNSINLALQGKVDSYRSNLKRYINENQERIDKTRKTIEKLSKKEIELNQRQKHLNKSHQKKRRLARLEKHLEQLESDKATGRVRICFGSKKRFNAQFYLKANGYENFEQWKSDWQKSRRNQFILVGSKDEMAGNKLCTAKRKKDGTLTLRVRMPDALVPKHGKYVEIPLVKFEYGQDVIEAALNDNEARRVLKSLKSSATKHYGQAITYRFLRDKKGWRVFVSTARPQIPIKTLKDIGTIGIDLNANHVALVETDRFGNPIEIKTIPLNTYGKSKGQTEAIIGEAVKAIVKRAEKTLKPIVIEDLYFSQKRSILRENGSNRYARMLNSFVYSKFRDFLESRASRHGIRVYKVNPAFTSVIGRVKYATQYGLTVHHAAALVIARRLCRFDFTSFRYFVSERAPSGCRNEVLIPNNRGGHVTFPLPVRKRSNGASLRSSGEACMVILAARVQKNQISGVCNTGSGGSIDGPIQPNAGAFGWDGGATLSRTLSGAIPAHESLAVLLG

SEQ ID NO: 1962 - protein, 547 aa, synthetic construct
  REGION 1..547: note = Synthetic
TKTLTFETRLDLIYEQDAALCQYAELWNQVKFRWFANLQKPKAQQLNRTQFMHEMGMPFSYRVFQGVQQSIKGLIQSYQTNRNNRLVTLDVKIKQLEKTLNKLNKRCDHVAEKGCPQQAKQLRNRLRQKEVKLRRWQQKQSALVAEKQENKTPICFGGRKLLKERQALETGSAIEGWKQRWHEARHREFLLVGSHDESWGCQNAQLSPSEQEDAYQLKLLVPHQLRATFGTTIHIDHLQFKHGRAMIAQAVWQNQVKKHDKSIKGQSLSFRFKRDKKGWRLLVSVEVAGPTEQAEWIDADQGVIGVDVNPDHLAVVELDRNGNPLQHRTFDLPLHYKNDVQRSAIIGDAVRDLMDFAAQQGKAVVIEKLDFQQKKRQYQKQDHPQYARMLNAFAYGKIKDLIETQSIKRGIRLYHVNSAYTSLLGRMKYRDRHGFSDHHAAALVIGRRHYGFKEKPPKQLIGINAKGIVKTEHPPVRMALRDYQYYTKLQRWYQPLEKSLDFLSGWRHFRRVNRVSYFVEARLDGRPGMSPDLIQESAPLLSAHPAL

SEQ ID NO: 1963 - protein, 586 aa, synthetic construct
  REGION 1..586: note = Synthetic
RKKKKGVGEFSFQARIKDPKACLGLDSLGPFYSSLTRHLFADLNKETLTTKPLYCASLEILARQFNGCKVEADARYKNALENYKFQLDNLPIRIQAIEEDLEKLEDKFTIHQKKRRWYHLSKQQEALEKKIKEENISCVFGSKKLWLAQFNLEANNYKSHEAWRKDWIAHRDYNFQVVGSYDETMGNGMCQLIQKENRFWNLQLRLPKNSPEKYLIIPGIKFNSDNEESYQTLLKVYLQNKNKELRQSIAFRFHKDKKGWIVTLTTRVSPVEVKTNINNGVIGVDTNPDHLAYMEIDRFGNPLPNGQAGKGQIFFNLKGDADFDLNAIQHSAIELVDLALRTGKSLVIEKLDFKKKLAQLEAMHGPAYAKMLSSFAYSAIVEAILSRAYKMGVEVRQVNSAYSSLIGNFKYTKKYGLTSHLAAALVIGRRCFRLSERLPQLASDYHQISVGRYQVTLEKPVDSSKHVWSSWAKVQRQMQKQLRELRGQSKLEFRRKLKQKSRRTLKLELKSKRRAMSKDIDPQKLVPSDLTITGEQGNEKNLQSCGDDASPLQLRSASNPEKAVPFRVSTSRDDTLGQRVKYGHQH

SEQ ID NO: 1964 - protein, 586 aa, synthetic construct
  REGION 1..586: note = Synthetic
EIRTFHTTLRVDDAQAVVLEASAFLLSSTKRKLFVDMQSHGTSKEQNRALKTRYILDYGISGRHFNGMWNELKALIDSNMSNKKNHIEDLKKKIASTKKTIAKIKKQRISPKNKTIEKFKKQKLNRREKIRNLKIKLCNQERKLKGWQQDLKDKKVRVTFGTNKLFKAQYYLEENKFKDHKDWRKAWNHARNNQFYLLGSHDESWGNSNCQMTENSDGTFDVELTIPLALVKEYGKKLYFKNVSFGYGCEALSAAVTANEERKAIPVKNKEERKEKGHSITYRFRKDDKGRWMLYAMLDIPNPDIVSRHYKYGVIGVDINQDHWAIVETDRFGNPIKFGSIPCVTYGKSSDQSIAIIGEASKELNEWAIATKKPIVLENLDFKKKKRQLAEYSPEKARQLSSFAYSAILRIIQSRAYQFGIETFKVNPAFTSIIGRLKFADRYNLSVHQGAALAIGRRKMGFSERPPKSALIQFKAGTDIHGTFPSPARIDWKHEWCWWKSAARELQSAVARQYRKQKKAIRQSQAKSQSGNIRPRDGVDQVGCDEKTHRGSRDEIPERRRHNCSDADSDSLPNESGLLLTFVNKK

SEQ ID NO: 1965 - protein, 544 aa, synthetic construct
  REGION 1..544: note = Synthetic
IFTYQTRLRTDEEQDALLSAHSKIWNKTKHKLHADIIKGAKPNDLKAQYVAGLSLSSKEFNSIKLELQGSHQSYLSNAKRYISEASTKVKRLTGQISRSGVPRVIIGKSKRKNILEKKILDWTSNIKDKKVPMCFGSKKLFHSQFRLEENGFSSHSEWKQAYDDKRYSEFSLVGSKDETSGNQQCQLIVNEHGSHDLKLRLNQQLHKDNKGSKYVIFKDVEFEYGMNNILDSINHCQDYNDHYKIRAKMIDDLASNQDISRKDAAKHPSVVQYMKANMDNIDGALTYRFKRDNKSWRVFVSTTVKPAKLVSSKARGALGVDINKDHLAVTEINHHGNVIDTWTLPMNLYGKSSHQRSAIIGDMVKDLMLIATEAKKPLVIESLDFKKKKASLKNQNEQYNSMLSALPYMQVKDMLEASASRYGIEVFKINPAYTSVIGRHKFMARYGLSVHHSAAMVIARRIFNYDEKPNRISMTEDNVVLDGKCSKYMQKLPVRNDSQHEWKYWASVVRKNKPLLLKHLRSIYPGGEFVSNPPTAIGVDAIRF

SEQ ID NO: 1966 - protein, 569 aa, synthetic construct
  REGION 1..569: note = Synthetic
CEKALHVRLRRLSLGAVSGSWSSETIKTTKNTLKRDFLAEFGLTSRQYNSLLRCLEGRYKSLQELAMLRIEKSQDKLSNLEKKIEKRTAKLKKDRATRDAVQERALVGKAPTKAQEKVLLGKVERDKLRFANHNQKRRIGILQERIRMDQQIAAAEVPPVVFGSKKRLRERAKIHPNDRQGLMVWRRKWEAARQSQFLIIGSKGETSGCQTCVLGKNKDGQFYLSLRLPNALKAQMGTHVQVPLTDLPERVREALEKALDAHVQRKPHKSSIAYRFIREAGHSDKTRLSQWRLLITLDQEIPEIPRPAFKTIGLGAGKKPKKNKDQALGQTDAFIGAVGVDLNADHLAYAAIDRFGNPIRAQSGKIPLHVRGKTSERREALIGDAVAEIVRIASRLGLPIVIEILDFKARKKELKDSNAGYARMLSSLPYSQIQTMLRRRAEREAVELVEVNPAYTSVIGRVNYSRRYGISVHIGASVAIARRAACLSERVNYIYSYRGCRNALPAPAEARRHVWRQWAGVRKELAQRDSDKSRIASGSAFSARSRKGRDVTSPPDAGGRHVVGVSAPV

SEQ ID NO: 1967 - protein, 349 aa, synthetic construct
  REGION 1..349: note = Synthetic
PIMTYANINVKVAENETPAFKEWCVHQRLPDALRDEGAGRHLEITGVEFPEFGRDAIHKALQVHAAKGKGPEARKGRVAIAYRFVRDEGWPRGNPLSAWRLFITLEVPGTEIQQPVFAAWGKGRNALMAQGVAGNFCGALGVDLNADHLAWAVIDRHGNLVKAKTGRIDLPLRGKTSGQRAALIGDASAAIVSMAAELDLPIVIESLDFAAGKRELEGSGAGYARMLSSLAYAAIQTMLRRRAARAGVELVEVNPAYTSVIGHVNYARRYGLSVHCAAAVATARRAAGLSERVNYVHGSRGRRNTLPTQSECRRHVWRQWARVRKGLLTCDSQNKGRHTAGAGKTDRIS

SEQ ID NO: 1968 - protein, 609 aa, synthetic construct
  REGION 1..609: note = Synthetic
LVRTFQLRLPRGPHETVLGHMAEHLAMVERHLHVALTRAGHETEAEIAAAGGSAAFEALLDSQRDADGKRPTGPLQRRKTAIKSTFIAEYGISARHFNSLLALLEGRYDSVREADKARLETLQDKRDRLQKKIASRAKKIAAFARVAREVAERAKLGKGPTKAQAKQLLSRQDSVRARFVQHQQKRRARDLAGKIARLQAEISRTTPRIVFGGSELLRARERIGKRDLPALVAWRKRWEKARAGGFLALGSKDETAGCQTCVGEIDAAGRLALRLRLPDAISTDGNRHLHLRDLDLPAFGREEVIAALMAHRVSAADRRAISYRFTRDADWPEGNSLSAWRICITIDQAVPEITSRVFERRLNRRGEPGSAAAGATEDFQGAIGVDINPDHLAWAAIDRHGNPVAGKSGMIALPLRGKSAGHRATLIGNAARDLVAIAVELGRPLVLEQLDFRSKKREMAEEGAGYARMLSAFAYASIQAAIRRRALRFGVELVDVNPAWTSLIGRTNFARRYGLSGHVAAAVAIARRAARCSERVNYIHGSRGRHNTLPTQSESRRHVWRQWALVRKDEVQARRRATGSRPAAGATTSSPPLTPDRAKGGAVRLSPQG

SEQ ID NO: 1969 - protein, 610 aa, synthetic construct
  REGION 1..610: note = Synthetic
LTSTTRVRLPAGPHDAELDRTGELFGRLERRLHVALRAIDRGLPGAAADRNALKVAFCAEHRITARHYNSLLRALDGKHASVIEKARIDAADLEDRLAAVRKKIADAVRKLDKDAAARAGIAARAAAGKAPTRGQAKDRLNDKDRAALRRGLHGRRRKADRLEGKIARLRALTERRVPPLVFGSRKLLRSRPQDGTPDEVAAWLLRWREARSAQIFSVGSRDEPGGSQCCRPLWDGWADGTIGLRLRRLGPVPAGASPYIEITGIPLNKHASALLGPVRDLFAADGSTAISVRLVRTPAEEPVPAGMSRWEALITVEEAVPDAPHRAGARVLGVDVNADHLAWALLSPDGNRLKTGRIGLPLDGRGAEARRSLICEAASALVKVAVAGTAQIALEALDFTRKKRELSLRPESANRRRRLHALPYAAMLEAITRRAARAGVLVLRVNPAYTSVIGRVNLATRHGISTHRAAALAIGRRAQGHSERPHYPLARPEAPDPSLGAVQPRRHVWSQWVVVSREVSRLDAVARKSAGSRGEVAPGAGPFRGRRPASGRPRPTPSAPVTDWIPDFPTVPGQEPTGNTVIPTAGDTSPAVRSGLVRCGQDIVRNDYVS

SEQ ID NO: 1970 - protein, 570 aa, synthetic construct
  REGION 1..570: note = Synthetic
VRTFQIRLPRGDHEDVLDAWGDLAGRAIRYIHVRMAKAHREMEGLAKAEQAAFLREEKNALKRDTIKAFGISGRQYNGLFAQLMGLWESRRELAKVDVDRLKARIDRKRKAVDQLTKRLEKDRSARKALAEKSAAAAKKGRPEPLPTKSQARALLDSEARRKIRFSLHQGKRKLASLEHDLEKARASAAKTSVPRIVFGGKGLMRERLAIHPNDAQSLAAWRRKWSRRRSAGFMLIGGSDEAYGNKSCKMMMDGAGRVRLDLRLPDGLGLGKHLSIGGIEMPDFGRPELEAAMRRNLRPGNRIALTYRFVRDPEFRSDRLSAWRVCITVKVVIEELAPAIRRLGVDTNADHLALALIDGDGNPLEKWRIPLPLRGKTSGQRAAIIGDAAARVCAIAREHDAGIVLEALDFGKKKKELADARKRALPEHARYARMLSSLAYRQIGEAIQRRAEREGIAVDRVNPAYTSLIGEVNFARRYGMTRHQGAAVAIARRACGFSERINYIHGHRGRRSALPSPEEARRHVWRHWAVVHRERSATAASARREHSAHPSGRGKSPGSIGQEILQRKVP

SEQ ID NO: 1971 - protein, 538 aa, synthetic construct
  REGION 1..538: note = Synthetic
SLSLTFQTRLNISAAQNAALSAIAGLMSSIERGLYVQWRKGQSLASLKNKTIARNRIPARYFNAAKASLEGKIRSVISNLANSEDSYQRRIKAKHRHIKKQAKALNKEENPQKRAQLRFGLHQSKRRLSTLKAHLLRIRQRLENNDPAICFGSKALFKKQFHLEKNGYCGHNEWQQDWQDARQSQFFIIGSKDESHGCQLCALTQAKDGTLSARLRVPDALVGEHGQYLELTNIHFAHGGDAINAALEKNQRRKSLSLKAGRDQFGDLYKHYGQALSFRFARDKKGWRLLVTTAAIRGRPCTCPEAGAMGLDINADHLALALIDRHGNPLNKWTIPCHTFGKTSEQRRAVIGDACKQVVKLAKQAGVPLVMEHLSFRKKKDELEKSHSARYARMLSGLAYDQIHKTLVSRAYREGVGLTRVNPAYTSVIGRTKFSGQYGLSVHHGAAVAIARRYFRFSERLPRGATARLWDDRAGHVALRLPEDNGKHVWTRWAILRGKLGTAFSERPKRSKHPPAFSATAGLCEGDSGVVFDTVPPF

SEQ ID NO: 1972 - protein, 283 aa, synthetic construct
  REGION 1..283: note = Synthetic
LGLKAGRDQFGDLYKHYGQALSFRFARDKKGWRLLVTTAAIRGRPCTCPEAGAMGLDINADHLALALIDRHGNPLNKWTIPCHTFGKTSEQRQAVIGDACKQVVELAKQAGVPLVMEHLSFRKKKDELEKSHSARYARMLSGLAYDQIHKTLVSRAYREGVDMARVNPAYTSVIGRTKFSGQYGLSVHHGAAVAIARRYFQFSERLPRGATAWLWDDRAGHVALRLPEDNGKHVWTRWAILRGKLATALAERPKRSKHPPALSATAGLREGESGVVFDTALPF

SEQ ID NO: 1973 - protein, 546 aa, synthetic construct
  REGION 1..546: note = Synthetic
IIRTFQCRIESHPALDDAAYLLGRLERQLYAEIAKGDADISALKRQFIALHGITARQFNALRIRVEGSISGVRELLKVEIEDTGKRIKGQDAKIKKLQAKTGKAKDAAARTKINGEIHQRKRRRAILVHRTEILRGRLARPEPGICFGSRKLFREQFALDANGYDNHEDWLADWQAARSGQIFCVGSKDETAGNQTCQGTVAADGSVSIKLRLPDALAGTHGKHAHITRLRFAYGHAQIIAALAACARKEGDAVTWRFVRDKKGWRAFVSVHEAATILCGDTANGALGVDVNADHLAIAVADHAGNPIAFRRISTPVVGASADQRKALYGDAAKVIVDMALARRVPIVLEALDFRKKKSELETSTSPRRARMLSSLAYTQIQAMIRSRAARLGVRVISINPAYTSLIGDAKFAGRYGASVHLSAALAIARRGMGLSERVPRRLSVMLGGGVRVTLVPPVRMGRRHVWASWAQIARGRKAALAGRSGSAQRRSSTARPQGPAVEGSLEQDRLFLDQLLNSGSAGAIPAAKTSPELLGRRTGRIATYG

SEQ ID NO: 1974 - protein, 551 aa, synthetic construct
  REGION 1..551: note = Synthetic
TSTYTTLLKTADINPETERLLSAYAALFGRVERKLYSSLCADNMTANERKSHFIAKYQISARQYNAILRTLAGKLDSKRELDKLYQYEKKERIEAVSCTISRLQSQAEMLSKTGGVPSEIQKIRFKAHQKSRYRARLTEQLEKIARNTGKIPAMCFGSKKLFGKQFFLKENSLKNHAEWLEEWQSARSSQFMVLGSKDETCGNQGAQLYVDDQGEFRLSLRLPDALGGGKAELSGFDFNYGKSAVLAACAENERRRAANVKELTRSSPWVPDRKTGELRPQTKNEVLASYGQPLTMRFMRHKFGWTLAVTVEELAPEALIGSYENGCLGVDVNADHLAVCVVTVDGNKRYVENIPCPASAKGLTTGQRMAMIGDAVKRIIEIGKTYGVGVGIEKLNFSRKKQALKETADKHHRTMLSAFAYNMVLSLIERRCYREGLPCKAVNPAMTSIIGMFKYHSTQNTTHQAAAQVIARRTLGLKHDRIRFSVPHNVGTQLCSARSRTVSIDGGPLQRWGKVKAVVKKHAALFKQPEKTGPPVPLMVNEHKLQPVSLA

SEQ ID NO: 1975 - protein, 292 aa, synthetic construct
  REGION 1..292: note = Synthetic
VKALTRSSPWVKDRKTGELRPQTKNEVLSSYGQPLTMRFMRHKFGWTLAVTVEEPAPEETTGSYEKGCLGVDVNADHLAVCVVTQDGNKKHVEDIPCPASAKGLTTGQRMAMIGDAVKRVVEVAKQHHVGVGIEKLDFSRKKKALKETTNKHHRTMLSAFAYDMVLSLIERRCYREGLPCKAVNPAMTSIIGMFKYHSNQNTTHQAAAQVIARRTLGLKHDRIRFSVPHNVGTQLCSARSKTVSINGGPLQRWGKVKAIVKKHTALFKQPEKTGPPVPLMVNEHKLQCVSLA

SEQ ID NO: 1976 - protein, 544 aa, synthetic construct
  REGION 1..544: note = Synthetic
MTTFTSLIKDLPENISQAIEAYASLFSRLERKLYADLVCDKESQLVLKKRYIKEYLITSRQFNAIWRGLQGKLQSKKELAKLYIADNKDQIRSLEKTILSLSKKSQSLDKTGGCPIRSAKFRFKAHQKSRRLSIVKQRLAKLQSEQNFKIHPICFGSKKLLNAQHHLNKNGYTSHKDWLCDWQSSRDSHFYVLGSKDESWGNQGAQLIPNDDGSLKLLLRLPDAVGGGRLEIPNINFKYGRETILKACLSNQHRLQMGSKENLTNLTNMVLAKDKEANVSKNSLLANFGQAVTVRFNRHKFGWQIGVSVDEESLVNEFTGFENGCLGIDVNAEHLAVTVVNKQGNKVFTTDISCPLSGKMDTGKRAAFIGDAVKEVVEIAKQYRVGISHESLDFQRKKRALKETTGKQHRSLLSSFAYNSVLSFLTRRAYRQGVLTKSVNPACTSVIGGLKYQNNSLTSHQSAAMVIARRGLGIWLEKIRFNVPIKVGVAVLNAQPATVSMPVDPFKRWVKTNKFMKQYRVEFLKPEKTFVNLKVIENSLRLAS

SEQ ID NO: 1977 - protein, 266 aa, synthetic construct
  REGION 1..266: note = Synthetic
LLLKCINHPPAERVTLDTEYGAIGVDFNVDHLAVTQTDACGNLLRTRRFPLLREDACSGRRNAVLSDALTAAVNWAKEARKPVVSEDLDFTAKKKAMAQLSPNRARMLSGLLYAKYRQLLEAKCFRAGVELFLIDPAYTSTIGAVKYASRRGWSVHAAAAGVIARRGQKLTERLPRAGTDVRVPARSGHHVLALPARMAGDSRVAAWRGVHAAYRGVVREQWLATRGGKPPRSAKGTHGGGVCAAPLSRGNRLPCESKLREQICAL

SEQ ID NO: 1978 - protein, 536 aa, synthetic construct
  REGION 1..536: note = Synthetic
TTQTRLYLPEADVRLLDRMGELHGSMKRKLYARIAAHGGKAKSHKTAFCREHGLSARMFNAIAIELQGLIDGTRELLRAERKDLVKGILRLERQLAVRRGQLEEIGADRLRLKPQREAKLRRTVHQNRIRLARLKAQLARVERRLERNVPGICFGTRKLFRQQHHPEAAGFDSRDAWLRDWQASRSHQIFFVGSKDETAGNQLCQLRKTGDAGYSLKIRVSDRLLSPDEGKYLVIDEITFGYDREALDAALEAGTALSWRLHRDERGWRAFVSFDHRPAERVTHDTLFGTIGLDFNVDHLAVTETDAFGNLLRTKRLALLRERASSGQRSAVLSDALTAAVAWAKDARKPIVAEDLDFTARKKAMAQLSPKGARMLSGLLYAKYRQLLEAKCFRAGVELIKIDPAYTSTIGAVKYASRRGWSVHAAAAGVIARRGQKLTERLPRAGTVTRVPVRGGHHALELPARKSGDSRVTGWRGVHAAYRGVVRERWLATRRGSPRRSVKGTHGGGARAAPLSRGDRLPCEDKLHVQICAPSN

SEQ ID NO: 1979 - protein, 764 aa, synthetic construct
  REGION 1..764: note = Synthetic
FSIGELAQMLGVAVITLRRWHKAGKLVPACRTIGGHRRYDAMKVREVMGMTTPAAGKTIAYARVSSHDQKEQLQSQAMRLRRHCEAQKWDGVEVITDLGSGLNYKKKGLLKLLTEILHHRVRRLVRVTKDRLLRFGSELLFRICAIYGVEVVILDADEDIPKEQQLTKTSLRSSPCSRQGYTAHAVVKTCAHLRHRHNCGHLYPIAHFVQLTTQTRPTITPEAALVLARLVGHYGMQLRKLYAVVAAKGGKVKDHKTEFCKAHGITARYFNGLANDLQGSIDSVRELLKQNVKDRNAALKKLKKRVAGFDKKFADLDAKRIAVTTKVFRRWTAQQRKLQLKVKRLEHKIAELQRRLKANVPGICFGSRKLFQKQFNLAESGYRNRAEWLADWRAARDHQCFFLGSGDETGGNQSCTLSVGEDGLLALRIRLPDAVIAAGKEKSECDGSPVEKPTGKDKYLVLGGLSFPYDEPALRWALREGKPLSWLIHKDHKGYRLIVSFARPAAPISTLSAKFGAIGIDFNADHLAVTETDPGGNMIRSWRVELPLEDKSTGQRAALLSDALEGVVEHALQAGKPIAAEDLDFTDKKKDMSAMSPAQARALSGLSYAKYQQLLASKCHRRGVELIKVNPAYTSLAGQIKYAKPRGLSVHKAAAGVIARRSQGYKECIPRLKSTPVSVKGVTVLFQLPARNRAEGGGTSWDELHVALGKFRRAIVAAQKKTSVARKVGTSRGKMPRGPSGGTVTPAGNKSSRSPDRGEQICSW

SEQ ID NO: 1980 - protein, 572 aa, synthetic construct
  REGION 1..572: note = Synthetic
TYQDRLTLDQSQQRWLSAFGELYGSLQRKLYARIAQGESTSAIKPEFCKEHGLSARQYNAMRMELEGKISGKIELLKVRKKDIAQSIKTTTRDVAQLDKRIAGQDKLLDNESKDIAKSKKPKALVFDLAYRDKLLQRRFGKATRLTVLNNKAKAVAGRLLANVPGICFGSRKLFKQQFHLETTEFGAGDAGHAAWKRAWRDSRSHQFFLVGSGDETAGNQSCKASVVHAPPTTEIAARPTLTLAIKMPAALIAKEAPKFLKIEGVHFEYGNEQVLQALANGTALTYRFHSDNHSAVGWRVFVSTDTIDTKLTTLQANLGTLGVDFNADHLAVAKTDRFGNAVQFWHFDLPFTSKASGQRDAILSDALDKVFALAKEHKCPVAMEDLDFSAKKKELTKLGMKHARMLSGLAYASYKQLSLAKASRLGVELIFVDPAYTSVAGSVKYAVRLGRTVHQAAAGVIARRAQGYSEKLPKSDAKGEYTFRAPLMGRMAVLTLPVESSKRTHVSLAVIRRSLSRHCAEQVRLRKESSNGRCKRANVSSNLLDEDPSSSREPVKLLDRRAIPPDFTDVPL

SEQ ID NO: 1981 - protein, 336 aa, synthetic construct
  REGION 1..336: note = Synthetic
MPNALIEKGAPKFLAIEGVRFEYGQEKIVNILRKNAISKSENKIALSYHFHKDDDTPTGWRVFVSTDVDDSQIITEDADLGVLGVDFNADHLAWAKTDCNGNVTDFNKIEIPVKGKSSEQREAILSDALDKVFDLSKLSGCPVAIEDLDFAKKKTELAKMGVKKARMLSGLAYSKYKQLAEAKASRKGIELKIVDPAYTSVAGSVKYAVRLGSTVHQAAAGVIARRAQGYSEKLPRASKDGKVVTIKAPLMGHVAVLTLPVKESSEKTGMTLAGIRRCLTRHCADLVRQRKLSSRLSCNGSLMNSHQINESTDSLREPVTLFDRRSIQTEFEDVPL

SEQ ID NO: 1982 - protein, 524 aa, synthetic construct
  REGION 1..524: note = Synthetic
RQLLARLKSAEAVSKLHRDQLERRLWQECLRLEIKKKRISQTDQHIVRNRKRLAEAASILDSRPKQLTAGQLRKIKNALDRKFRCEKRLKILAARKSHLLRSIHFAKRKIQKIASRLKRVECEIQEPSIHFAPSKLFCAQHHLQASGFSSHEEWRAAWQEALSNNFLLEGDKSIPSGNRYARLHGRGGFHDLELRLPAVLAAGADRSEVVKGRSIYMLDVKGLSFHHGRDIIKRALAQGSPVTVRFHKDDVSWMVSVTVYEETKVPPVSWHDGAVGLDWNAGKIVAAMVDSGGNLIKTNTFACLTTGGTANQTKDKIRKVCSQIASFAKTLNVPLVIEKLDFAQVRSSRRAFGDKRYARRVAQYPYAKFTQAMTSASARQGIPLSVVASAHTTRVGRYKFARRYGLSTHEAAAFVIARRGMKFSERPNEPTLQHERWQSRPMRPTVTHEERKARKSGGKLQPVGDREGGSHTEAVPTMDVETTTRPRRRLWRSVQPLHSLSVFSGRSLGNRFSRGSEGWEPRRE

SEQ ID NO: 1983 - protein, 553 aa, synthetic construct
  REGION 1..553: note = Synthetic
FRSFQTRIRGDQPVLERYAAVMSRAEHKIFALLQAGRQWKGDIHTTLYPDFGISATHLDMVYRQLLARLQSLREVGLRHIREWELRLAITRRSLGRMKQALQKQASAIAKLVAEDVELTLKIQGLKRALGNARHVALRIRPLKTLLDASYRKRRLLARMRVRRRKLLRGLHYGQRKEQRLRHRIARERAKLERPSLCFGTRKAFRACFFRTGVIGGATKWRELREGRFTLEGDSIRESGNPFARLRPHADGTFDLELRLPYALRELAEVCCTVKNSRQYIVRFHGLRFQHGQRDLEQALAGHRSITITFIKDTTSWRLIASFRQDIPEVQTPPRAGAIGVDFNASHAAAVFIDAAGNPGRTFSAPASTRGLSANQSTDLIKKSAARLIAEAKAARLPVVIEQLDFSYRRVVAEHWRGPAYMRALYRLPYAKFREAMLSAAARNGVRLFQVASQNSSRSGHQRFARRYGLSIHHAAAVVIARRAMIKSEQRSLPPGYNSGKASQWHPTATREERKACTGKPGESVDRIDSGGAAGAQSVGGPSPTHRAHSLDSG

SEQ ID NO: 1984 - protein, 613 aa, synthetic construct
  REGION 1..613: note = Synthetic
RKAVRLAPVVAEYAKLMSRAERHLLAQLKAGRTWTGDLKVSSYQPLGISAVHLDMAYRQLMAKLASVSELAKERADDLARKAASKKTDIKRKTMALARTAKARVKLREELATISVKLEKRRASMKTANEKKRADELFALKQLLIKHHARRAALENATFEIQELRFALHQHNRRLNILESKHAEARNLAVDPTICFGSKKLFRAQFDLQKNGYADHAEWLGAWNAARSAQLTLDGNSSKEGGNQFARLNPRRDGRFDLELRLPKVLTHLATRTFKVSGQTIACVDLHGLSFNHGNVVIEQALANRKPVTVKFLRDAKSWKVMVSVDHATELKTPDFSAGALGVDLNAGHISAALVDRDGNPVEVFEFPCVTYGKTSDQAQDAIRKVAAEITALAERLGVPVVSELLDFSEKKKTLKDATDVRYARMLSSFAYSAFGKTLASACARSGVALRRVNPAYTSIIGRVKFARRYGLSVHEAASVTIARRAMGYSERLPRSSTGTVKVPTNGCDHVTLDLPVRKDASEQAPKSRHVWSRWNGLNKEYQKALAALGSSRRRPRPKRGSRRRGVANCHRCGGTLAGGAENRSMVLRKRQDVPAKSRFSHAARRRSVPGINS

SEQ ID NO: 1985 - protein, 612 aa, synthetic construct
  REGION 1..612: note = Synthetic
QVSVQTRLDLSGGNHRFDHLFHDYAELMNKVERTIHAKLKAGREWRGDLAISLYKEFGISAKLIESAYFSLQGKLQSASELAKLHATELGDKIKAKESQIEKKTKKRKKNRQDLSKALLKFDGCMAKSKVLKDELDIAKLDKRIKTLQRYKSELGKLHGLRKKISELRHNIFQLGADLHQHKRRLETLRHKLKKAFARIKNPSICFGSKALFKAQFNLEKNGFASHKEWRAAWVEARNSTFIIEGLASAEFGNEYARLKPREDGLFDLELRLPEALKQHATKVKKVRKRDVYLTAIEGLSFTHNVDLLRESLIEETSVAVRFKHDDKGWRVYASFKVNHNEAAEDYSCGAIGVDLNAGFVSVARTDRFGNVVETFDIPMVTYGKSQGQSATIIKQVVVQIVEYAKRHNLPIVSESLDFAKKKRTLCDENPSYARMLSSFVYSSFDTALVSACARHTVFHRRVNPAYTSIIGRTKFASRYGLSIHAAAALVIARRAMKLSEKLPLSFKERVVTLPLNDAHHATLELPVRKKPGEQGVGTRHVWSDWNEVNKTLRRALAARRPSRRKRRRSIPVVGRNDLHSMVCRSRRDVLESSSESSGPRVGPGAMVSTVKR

SEQ ID NO: 1986 - protein, 295 aa, synthetic construct
  REGION 1..295: note = Synthetic
VAVRFKHDDKGWRVCASFKVEHERAVEDYSCGAIGVDLNAGFVSVARTDRFGNVVETFDIPMDTYGKSQGQSASIVKQVVVQIIEYAKRHGLPIVSENLDFSKKKRALKDESPRYARMLTSFVYSAFDAALASACARHTVFHRRVNPAYTSIIGRTKFASRYGLSIHAAAALVIARRAVNLSERLPLSFKERVVTLPLNDAHHVTLELPARKNPGKQGVGTRHVWSDWNEVNKTLRRAHAARRPSRRERRRSIPVMGRNDLHSMVCRSRRDVLESSSEPSGPRVGPGAMVSTVKR

SEQ ID NO: 1987 - protein, 546 aa, synthetic construct
  REGION 1..546: note = Synthetic
EMGILWAAAQHFLYSQFLSGCEWAGDIAIKHYADYGLSAKQWEHCWRDLMGRVASQRECDKLNTENLQKRVTSKRKAILASEKRLVKADKFMLAQEELQAKTDLAIAAGKKPPKKQFDSVMYERSARIFANTPFYLHKHKRKLDALVFVLEASRLPRTLCFGGRKLLNEQHHLEENGHKDHAEWKEKWIDARNGQFFIEGDAAYASGNQFVRLTQGEDGTFNVEIRLPERLQHLAETHGKSGGTIQHAIHFQGLKFEHGADEIRRALHWKLPISWRLMRDGDSWRIFAMITREYAEQEKFGGYRYSSGAVGVDVNVGHVSVTHVDRHGNPVETWNIPLNCYGKTQAQREDAVRKAAFAVVMIAVRLDLPIVSELLDFKDKKAQLRDSHGPRYARVLSSFAYSAFDAALSSACVRHSIHLRRVNPAYTSVIGDISYARRYGYSVHAAAGCVIARRAMRFSERLPSQVRLYRPRHADQVTLDHHEWNGPTPRKGSTQVGHVWSAWRIVARKRRAVLAGPSGPLPKGVRPFDSTLGSPTPSAKARRGGG

SEQ ID NO: 1988 - protein, 535 aa, synthetic construct
  REGION 1..535: note = Synthetic
VRTFTTRIESHPALAARAELESRVERKLYAALRSKREFRGDLATSFYQQFGISAKALDGIHRQLQAKLKSISELAKAHVAELGIMIETKRKRIATSQKTLRRPTGRGEVRPPGLRRSLHQQKRRLAVLESRYAAARMSVDNPRICFGTRKLFNAQHRLEEAGFADRADWLRQWQTVRSAQFFIEGAARLPSGNPFARLTAKEDGTFDLELRLPDTLGYLAQTEAVPSGHVVRSTHFARLRFAHGDAEIRQALTTMKPLSYRFLRGEGGSWFVSVMLQQEFTDPSVRDFSNGCLGVDLNVDHVALTLTDATGNPLTTVKDAPGNPVMTRRIDLPTFGKTRPQRLDMIRKAAAEIAALAMQLGVPVAAERLDFKRKRAELETAVGRKRARMLSSFAYSSFVEALSRVCIRKSVRLVLVNPAYTSLIGRVKFAPRYGSSVHAAAALAIARRAMALSERLPASGEGIPVLLASGDRVTLPRPARIAGRHVWSSWSQLSRGLSAVHAGHRGARRRVRSDGASNLAVATGTGSRRPFSGPG

SEQ ID NO: 1989 - protein, 638 aa, synthetic construct
  REGION 1..638: note = Synthetic
IRVFETRISRDEAFTGKGLEGFAHLMSMAERKIHAFLMAGNEWTAENYASIYQKLGLSSTAFRSAKTSYEGKIDSVKELVKLNIATLEGKIKAKEKQAKEKLKENEALAGKVEKSVLKLKGLKGKIAEQKEKLDALPVVKVVPREKALARLKKLLDKADIERAKIKELRVATKKNRNDIHAHNRRIGNLQAKLDVAEARLQNPSIAFGSKTLFRKQNNLAKNGYNSHKEWLNDWRQTRKSSFFLVGARSAPGGNELVRLSLLPDGNFTLELRLPPKLASQATAATKVNGRVIPSIVFNGLNFNHGHDVLVDALAAQQPLSFRFIRDEKSWKVMVTVDEALPDAGTIDWSFGALGVDFNADHIAASLVDRFGNPVETWRFDFCPEGKTSDQNLDAMRKIAKEIALLAKQHGVPVVSEYLDFAKKKEQLGAAFGKAYAYMLSNLAYSAFDKALTSACARHAVHLRRVNPAYTSLIGRTKFARRYGLSVHAAAAVTIARRAIGLSERVPFVVQRNVLVPLDTGDHVTLCPPARTNIRHVWSSWSDLQRQYKKATAKAYAEAGRAEGSTSRSKARRPTRKGRQSLRDRWANGPSSLSGSGVAPAMERNTRARACLGGISSIETIRLPLDGFGWSQRSTEVSG

SEQ ID NO: 1990 - protein, 624 aa, synthetic construct
  REGION 1..624: note = Synthetic
IRTFETRISAADDRHADLLGKIAEKMCVAERKIHAFLAAGKEWKADEYRQIYTKLGLSAVMFRSAKDSLDSRLRSISELAKVQAADLTLRVDQKKKQIEDKAESLAKARASLAGLQIKLDDLSCRISDLQANIEAASKPSVKAKAVAKLKVLLDKRSIVAEKLTGFANDIEQIPFSLHQHRRKLASLEYQLHRAEVRVEPPHICFGTKSLFRQQFELEANGFKSHTEWKSAWKQARTSSFAFVGVANMTGGNEVARLKLRKDGLFNLELRLPPSLRTSNHSFITFRKISFNHGHDAIVAALARQQPLTVRFVRDDTSWKVHVTIEQPTASVKFDDNRGCLGIDLNADSVALTLVDRFGNPIRSWTIPMVTHGLSSDQALDLTRKVAKQIIDLATKYHVPVVAEDLDFATKKAQLTSDTSPRYARMLSSLGYSSFQRALASACARNTVCLRQVNPAFTSLIGRTKFARRYGLSVHTAAALSIARRAMGFSERMPKPIEGKIILPLDDGGHVTLSRPARIEGRHVWSPWRTLNVRYKAALAAHRRTRHKSRSSGMVSGGPNPEELPLRRTNGPSPVGLVRMFPDETAKFRGGAIPGPGDIYHSHQKIGHWVGQPHDNPNSRGYVCP

SEQ ID NO: 1991 - protein, 557 aa, synthetic construct
  REGION 1..557: note = Synthetic
TFPARIDDETCHPALVVMAGIDSAVQRKLHAALAAGKYNDGPYKRGIEEEFNLTSRQFNAMANQAKGKIKATTESLNDNIVTTKAKQNQLVKQVAELEKTITTGLDKKGRRVGKAKKTRYLFAIHGKNRKITRCEHKIIDMEARVAAPDPGICFGTRKLFLDQFKPGSDHTAWLERWHTARNAQFRLVGAIDEPTGCGSCQSVMEDDGTVTLRLRPFNSMLAPRPVTGKPAETMNRRKTITVKANDYIEIRGLAFHHGHAFIRDVMHRNQGKDKKRRTPLTWRFVNQDGTWYVHLTFDIADKTTFDGSKGAIGLDCNQDHIAATVVDQHGNFVACRRFDLMVYGASSDRAADLIGCTAKDVVAWATELGLPIVAEALDFKKKKLDMTDLSGKRKRQVSSFHYAAWGQALRSRCLRFGVAFAAVDPSYTSLIGHVKYAASMGLSVHHAAALVIARRGLCLSERIPRSAIRVADGKGHHVTLRPAVSMGSRHVWCSAWWGMPKAVKAAHAALLSEFRLRQLECLAALKSHVIAGKPEAWGIDGGIPSRSPDFRSLGGMP

SEQ ID NO: 1992 - protein, 325 aa, synthetic construct
  REGION 1..325: note = Synthetic
VVTAAIAAHAKGGGEAISWRFVRDDKGWRVFVSVFRRLADTEADFSRGCLAVDMNAGFLAAVRLDACCNPKGRFTIPMPTQHRRHDQALAAIGDAVARLVRIVKRHGVPIVIEDIDFEAKKARLREESSPAMARMLSVFVCSAFRSMLERRAARDGVAAIAVDPAYTSLQGRCRFMDRYGLSVHHAAAVVIGRRGMHHSERLAASLTVPAGDIPMAARRNVTRVTLRRPARNGARHVREDWAKVQGSWKAALRGLRPTRRKAGSSPALTSADERSLAGDAAFLADVATPSRAHDGGIPSREPSAELLGGRRGATLLKDEQTCATS

SEQ ID NO: 1993 - protein, 574 aa, synthetic construct
  REGION 1..574: note = Synthetic
RTFQARIDGPPTLDATAALLSRAERCLWAEMAKGRKPNDCKSEFLRRFGITARQFNALAVAAKGKASSLKEIGKLRIRELDARIKATLKTIRKLEKRKASAAKLHQKKRRLGILRDRQKAIRAEMKRPAPALCFGSAKLFNAQHHLEANGYADHAEWQDAWRDARSSQFFCIGSRDEASGNVSCTATLTAEGAIMLRLRLPDAVRDGGPKYAEIGPVSFGYGHDVVTDAIQAHATGQGEALSWRFVRDAQGWRVFVSLFQALPDTVPDFARGCLAVDMNAGFLAAAFLDAHGNPKGRFTVPMLTQHRRTDQVEAAIGNAAARLVSLAKRRGVPIVIEDLDFEAKKTRLREEARPRMARLLSAFAFNGFRTMLERRAAREGVAVLAVDPAYTSFQGRARFMERYGLSVHHAAAVVIGRRAMNSSERLPLSLALPAGDIPAARKRNQSHVTLVRPARIGRRHVRDQWARAMGAWKAALKGLRPTGRHKAAGPSPAKTARAAPAWDRSLEEDAAFLANPVFPPRTHDGAIDAAFLANPTFPPRTHDGAIPSREPAAKLLGGRPCATLLRDEQRCAGF

SEQ ID NO: 1994 - protein, 593 aa, synthetic construct
  REGION 1..593: note = Synthetic
ELTTTIETRIPKLLLPLVDDVMLKYSEIYSHAKWCYFARKNRGETINKPSFCREFQIPSRLYNAIKGDVDGMIQSQLSNIQRYIVEAHQKIADAEAYIEEQQSKIAVLNAPSRQSKTNTVALDKAYRAIRGKRRLIQRKQSAVEKWLSQLESGRVSVCAGSRKVFSKQHSLFENGYRSHKQWLKDYRLARNDEFYIKGSKDEATGNTLCRLTKDGDQYALTLSLPESMKEQGFLQNLVLNNLTFNYKSSILDDAITDNQRRAELGSKANLSSQFILANHTKNIEEMKIRNNNIVSNMMKRGDSKQKVDDAIKSYEKRLTAFSAPTKSNLLCDFGQAISYRFKHDSKGWRVIVTITRTVDQPYITNAINGCIGIDLNEHHLAVTEVDSNGGKVGTEDLFFHKNKSHDISSRQTRTALEEAIKMVIAKAIATKKPIAIEDLDFKVSKANLKKGFNQTFNRTVSSMITARFLAVLKARCIENGIELKIVKAAYTSMIGRIKFANQFKFNIHAAAAMSIARRGMGKIDLNFPSKVIIVVRNLQMTFPVPEDTGKYDAFGYYKLVKAAYDNWLKFTLVLLRENTKVLTQGGYDEDIFI

SEQ ID NO: 1995 - protein, 570 aa, synthetic construct
  REGION 1..570: note = Synthetic
TRDTFYTTAQGRLPSDLTRKQRQALGAYSDQFSRAERHYLAAVTRDEVINKPAFLAKFSITSRQFNAVKRSAQGKIDSQLSNLDNRLNELAIKIKRLEKARKKLTAHIDAWKKKSDAANQQQKLDYFYHRLSRVDRGLQISKSKQAAFSQQREAKRPSICLGSRRLFKAQYHLEENGYANHREWRDDWETARRSQFFVLGSKDETMGCQGCVMTRQEDGRLTLRIRMPSGLEKVHGKHLVIENVELGYQAALVDEVIERNLARQAKAKRLNQINYAARKAHKEKKAEGKPEQINLNEVLAEEGLAVNFRFVRDDKGWRVLISFEQLAMPDANTDMSKGVIGIDLNADHLAVAEIDKQGNLVKSWSIPLPSDLDASSRANRTAIEMACQEVVTFAEIAGKPIIIEDLDFTFKKANLQKGKNTRYNKMLSALSYRAFEQAIRRQATKRGVYVKSVNPAYTSFIGQVKYLNQTRGSVHEAAAMVIARRGKGHRDRLPKESRQTFRSQSRTFLLPVDRRKDLYAVYRKAKEAFDKWMAAQISELRQNHQDDLERRCQSRTVSELESELDALTAA

SEQ ID NO: 1996 - protein, 544 aa, synthetic construct
  REGION 1..544: note = Synthetic
ESRTYVTTTTNRWVVAFLSDMAVTNREAKLTCLKLVLKGELSKSQINTSLQQQYRINKRQANSIIAYVEGAVKSAHVCRSNHLELRIGKLKHVTDVSKNLEKKIAAHRKYLQTVEQVNRGEKKRVPKSIKPRYPDACPIRCAHHLTHYEFASVKLHQKKRYAHKLRSQIEHIKQSPLHVTLGNQYTVEMVGSKDESYGNQICQLDLLGKELHIRTPYCLESHYGKYVTFPMRLSRHGQDQLATAWFNHQSITYRFIQKSLREWEIHITVDVLPTPIQSAPAQWGTIGVDLNPGQIGWVKVDKDAHVFRGSTPPETLRGNLEAQGLIRTNIQSQPKGRTEAILVDAVTELTQLAFKYKCPIGVEKLDFSDKKKRLRELPARHNRMLSNFAYSKFLQLLKARCFKQGIQVIEVDPAYSSVIGLVKFMSMYGMNSATAAALVLARRAMWLSERPPARTAYQGKEPRKHVWSDWRLTAKRVKGSARHSFYQPKLTVSSRLRPVRNSLPRSESSAEAIQLSLELGVVSESLTGSRRTARRRAPCISRFA

SEQ ID NO: 1997 - protein, 304 aa, synthetic construct
  REGION 1..304: note = Synthetic
MVGSKDESYGNQICQLDLIGSELHIRVPYGLELRYGKYIQFPIRLPKHGTDNLATAWYNKQALTYRFIQKSLTEWEIHITFDVEPAPRITAPVSWGAIGVDLNPNCIGWAMTDFDGNLDGFGQFKVNIQSQPKGRTEALLVDVVTQLTNLALEHKRPIVVEKLDFSDKKKRLRELNARARRMLSNLAYSKFLKLLLARCFKLGIQVIEVNPAYSSWIGLIKFMSTYGMNSATAAAFVLARRGMFLSERLPARTAYQGREPRKHVWSHWRLVAKLLKGSSRHSFYQPRLTVYSLVTLCCGWGITG

SEQ ID NO: 1998 - protein, 553 aa, synthetic construct
  REGION 1..553: note = Synthetic
KKQTYVKQIHIDTDTGLFLADYATISMSASIFSLKGLLENQKQSELKTALQNKFAINRRQASSIITFIEGEIKSAKESHTRHIKTLEGKIKSLKSSVDAREKKVKKHIEYLQAVTKYNSTKKQGKKAKIPSKYKPQFDEASSRAFGRYSGTYYQSAKKKLHHQKRKLYKMTCQLKYLKTKQLHVNLGNKETIHFVGSKDESNGNQVCQLILGLEKNSLDILKIRVPYALESRYGEYVEVPINLNGYGDKEIRAGWAEGRAITYRITQRKYGVWEAHITVDVYRSITSDSVMLGCIGVDLNIDSVAWCKVNADGNPKRFGEIKFNLHSLSHNQTSCVLASVVTELTTLALAFKCPIVIEELDFDAKKAQLNSGTKHKRYNRMISSFAYNRFYELLSSRCFKLGIKLITVNPAYSSLIGMTKFMSNYGMNSGTAAALVLARRAMNYSEGVPARTAYFDQESKKHVWSHWNRISKRVKGSARHSFFQPRPTASPSLRNGTTSNSALEFGNSVATLTNHPGGLNVPNEQTFASSNFERLECHLETDEGNRTTNRDCA

SEQ ID NO: 1999 - protein, 700 aa, synthetic construct
  REGION 1..700: note = Synthetic
TIRCSLTTDEVTRKFLWETMVTYTLLINTLFKEVAEHNQFQEWQAKGFIPREPLGKMIEDFEKCPNSQKLPARFYDSATRMTQYVYKSWFSVQKQRHSRMLGKKRWLGIVQQDYDLEQATSFTLEEIFAKAQAILEGLSPPSETQGDSRRKRKSTKSSKSLIGELLDQFEMTTDTLHQRAIIHLLKNDLKVSEKPDDPEELKQRLDSKQIEIDRLEGELQSRFPKGRDPTGERFAAVLLDAISLPPEDNPDSIATTINEWREQKQISFLNPLPYPILWGSADEFIWSTEPRSNSTSSESLESSSKKRKSKKKKCVSDRICLQFKRLGNFIFKIQCDRRQLPIFHQLVADYQAYAASPEEQCFNQTVFALRSAQLIWQPDTKKSKKQQKLDQSKSLTSNQPWITHRLYLHCAIDTGRLTAEGIEAVIQETRCKIIEELDGRDKLTDQEVEQLPLTKGQKSRLKSLRTQLTRLDNPYPPRPSKPNYKGDPLITVGVSLSRQMPLTACVIDLRTGNVVERQTSKHLLTIHGIKVKRGKRSILQLRLEHWRLVNKLHLRRQRNLLQRQKEQKQEQYREGNNESNLGSHVERLLANRLVRLAVKWNAGSIAVPDLKYIREIIESDIQARGKLKFPQQKELQEQYAKQLRASFHRWSYHRLVEFIRERASSAGIQVVAGKQTNQGSPMQKAVEVATSAHKLSALQA

SEQ ID NO: 2000 - protein, 423 aa, synthetic construct
  REGION 1..423: note = Synthetic
LWGSADEFIWSTEPRSSSTNSEPSVESSSKQRKSKKKKKLVSDKICFRFNRLRSFVFKVQCDRRQLPVFRQFLADHQVNASAPKEERFSSSLFTLRSAQLIWQKDTNKRKEKKSDKSQSYTSDQPWATHRLHLHCTIDTHFLTAEGTEAVKEEIKCKVANSLKEQDKVSDQEVEPLELTEGQKGRLKAKQTQLTRLENPYPPRPSKPNYQGDPLITVGVSLSRQVPLTVCVIDLRTGNILENQTTKRLLTIHGIKAKRGKRSALQLRLEHWRLVNKLNLRRQRNLLQRKKEQKHDQYQENNSESNLGIYMERLLANRLVRLAIRWNASSIAVPDLKRIREIIESDVRAKAKHKFPQKKELQDQYARQLRASFHRWSYSRLVQFIRERATSQGIPVVSGQQLKQGSLQQKAVEVAMSAHRLPAL

SEQ ID NO: 2001 - protein, 687 aa, synthetic construct
  REGION 1..687: note = Synthetic
TILCCLCVKVETRRFLWNAMVTYTALVNELLELVSQHPKFEVWRQQGKITRDEVKSILRPLKQNSVYAALPGRFFTSAELMVTYAFKSWLALQKHRHHQMVGKLRWLQVIEADLQAMPTSDLSLEVVQARAQQVLEHAEQSTDTQQGRSSFLSRKGKRRGNPLMGFLLDAYEAASDELERRAICYLLRNDLKVVEEDENPEVIQFRIDRKRIEVERLQDQLQSRLPKGRDPTDERYLEALGAAIALPDVDLSPIDEEDWSQWKAQKQLPLLNPLPYPILWGSSSDLRWSIIANSEADGQPSKRRKSSKRPKEKIQVQFNGLGKHTMSIQCDRRQLPVFKQFAEDYITHESTAEEDKFGMSLFALRSACLVWKKDPQAAVKRRKHKQKAKAQLDKITDYDAPWQTHRLYLHCTVDTRLITKEGSEQVRREKASRAEKLVAASVGKELTKTQQKNLKSNKTSVERLRRQPPERPSANLYHGNPDIVVGISLSRHEPVTAVVLDRSTDRALACQRTKALLKVRSIKKTYPNRSLLQRQKEQCRLVNRWRSQRRYNLSQRPEDQKHDNYRQQDAESALGDYLDRLLAARVIQLAQKWQAGSIVLPSLGNIREIVESSVQAEAERRYPKHKELQDKYAKQYRLEFHRWSYGRLLKYLKECARQHGLTIRQERQPKQGSEQEKALALIASAFL

SEQ ID NO: 2002 - protein, 730 aa, synthetic construct
  REGION 1..730: note = Synthetic
TIQCRLSASEQTRRDFWEWMETYTLLVNELLEKIAQHPQFQEWQKKGDISREAVRKILNPLKESPQYAGLPKRFYTSAELISCDTYKSWLALQQQRQLRLLGKQRWLQAVESELELSSTTGFNPDEIRAKAHVIREEAIQELNQQGNKLKNVMGILLKRHEKTAKNSLSHRAINHLLINNLQVSEQDQNLNELSSRLDKTKVEIQRLEKQLTSRLPKGRDPTGQRYLQILAHISTLPELKDDPQKLEAELDRLTIQQQLPLFNKLPYPILFYSSGDLYWSVQSEKKSNPSNPDNKIPPELPKTKKRHMKPRKRPTERICVEFKGKEFRGAKANKSQSEGAKDYTFKIHCDRRQLPLFQRFLIDYQTYKKLPAKKRFSERLFTLRSACLIWRKDETRHSTKKKRGADQQQDQLKPWNTHRLYLHCTVDRRLLTAEGTQQVRVEKKQAILKELKGKEKLEEKELHELGLTQTQISSIKRKCSTLNRLEHNSPPPRPSSVPYQGQPDISVGVSFSRHQPIAIAVVDVNKQEVLECQSAKQLLNGGKAQFIWRNGLKEPVLKDGIEQRHPNGGKLYVRKRKRVQWKPYRLVEQLHRRHQQNARRRAKQQQQNRYREDSSDSNLGLYVDRLIAAEIVEFALQRKAGTIVIPQLKGVRESVESDIRAQAERLFPNEKERQKEYAQHYRASFHRWSYARLSECIRECAKKEGITVVQRKQSSQGDLEQKAIAIALSS

SEQ ID NO: 2003 - protein, 826 aa, synthetic construct
  REGION 1..826: note = Synthetic
TIQMLLCASEEARQHLWLITIVYTLLVNQLSQEVSAHNDFQSWQTQGFVSQKAVQAICKKLKKTEEFSGLPARIYTSAVLMVSFTFKSWFAIHKKRQQKLDGKRRWLQMTLEALALAESMNFSAETVRARATEILLEIQAQLEKRAAKQQESGELEQQSQTAQASVMSLLFQAYDQRQEPLDRIAIAYLLRNDCKVNEEEEDPDKLALRLEKKKIEIQRLEKQMASQLPTGRDPTGDRTQQCIDEAIAFAEHTTLIPANFWLQWHRTLLTRQSAHGISVQLWALGYLYDRLNDDAEFEAWERDLPRRLAKLSTKFEALPYPFIFGGADVYWSREADVPSNTVKASSSRQTAPSTVDVQKQRKRKRCRTRRRQKKLTGRFCVRFKGKGLSHLRFRVYCDRRQQPIINQFVTDDEELKARDKDNKFSLGLGALRSAHLLWEEDRQQLHTKQHWKLQNLWLKWFCALSNGTAMRDSELDLWFTSLFYLALSKSIPWQTHRSYLHCTIDPRLLTAEGTEAVRQEKLAKTLERLAQVEKNVKLVEQQTEQQAHEDGETLATAGEMEQLDEEQDEESVAQQGKHRQTAVKRLNSTRTRLGNASPSRPPRQTISQQQDIAVGVCFSREKVLGVAVVDTRSQAVLDFCNLRSLLTDDRLALLTKRAAKIPASRKGKRSVRQLQLKDYRLFNRWRRLRHQNLTQRGDQQRHGLYAESHEESNLAQHLKRVIAKKLLQMAQQWQASRITLPDFGNLRESVECEIQARARRKFPDDNVKLQKQYAKELRMSHHRWNHKQLAQSIRACAAQTGVPVMTATQPKEGELRDKAVALTLAR

SEQ ID NO: 2004 - protein, 841 aa, synthetic construct
  REGION 1..841: note = Synthetic
TAKLLLSAPIETREYLWYLFLLYSLLVNQLIETVIADRRFEIWKDKGKVAKKNVRSLCNQVGKENLFSDLPAHMFTSATLCVLYTFNSWFEVQKNLRFKISGKQKWLQVMEADIALSLSTDFSPEVIQARAREILAQAAMKLTAKQAQDDFFSIMSLLFIMWEREAPPLDRRAIAHLLKNSCQVNSEEEDPDALELRLERKRIEIERLEDRLKSRLPKGRDPLGERYEQSLEEAITFPDHPAFLPTDFRLKWHRTLVDRSDGQAESLALWFLNLVHYDVTTVKDFEVWEQDLPRRTANLSRHLKTLPFPLLFDSTDDLHWLREAPSGKRTSTANAPTRRRPRRCRTRKRQKKSAGRIFVRFKGKGLSHLRFGVYCGGRQQPIVDQMLVDYQAYNAIKNKDDRFSLGLSVLRSASLCWKENPQKLVKKNHWKLQNLWLKWFCAIDMPKDSPLSDAELCFSNTEFEGWFKGLYYLTLSTKLPWETHRLYLHCTYDPRLLSAEETEQVRQEKLIQMRKVLEKLETPSVEEDETLIELKEDALKKQKDREAAIKRFSTSLFRLENNPPPPRPSQVIPVRDTRVKIGVCFSMHKGVGVAVVDSRVPATQTDGLIEPLEYQDLRGLLSQPKSETLEMRSKKIREKFKHQQMEPTLPRNISYKTKSERKEARRLKTLKGRRNVLQLQLEDYRLLGRWRRARQKNLSQRGEEQKRGLYRQSNEESNLAQHINHLIAKRIVELCHRWQASSIVIPDFATLRESIECEIQAKARKLFPGDNVTLQKEYAKEIRVHAHRWNHRHLGQCIRGCAAKYGISVVTGYQPKEGTMKSKAVGICADRSDATQNGIAA

SEQ ID NO: 2005 - protein, 777 aa, synthetic construct
  REGION 1..777: note = Synthetic
TLRLLLCFDENTRKQLWDLSVRHTLLINQLLVELPKQSKFESWRKKGSIPRKEIQLQLTHLKNKKFVHLKEEGVFEDIPARMLTSAVLSVQYMFASIFARQRKLHFQCEGKKTWLAIQEYDLDLAQSTDFTPEQIRDRAKQFLEEVEQRRQELREENQAEQDLPSVMSLLFQLFKETETPLEQRAIAYLLRNDCKVKVKKKKKKEGGEVEEAEVEDRDAILLRLSKKRIQIQRFEEQMAVELPIGRDPLGYRTDQLIQSAALFYPEGEFEAWQKEFAVRLANLSSDLETLPYPVLFGSNTDLYWSFETNTQPEEPKTSLCEIVNPNGTPSSRRKPKRRRYKKRKKLNTARICVRFKGFSGIQGKTYCDRRDLATLRQWVTDLEENKRRSKEDKFSLALLPLRSACLLWEPDKQHAGEEKPWQSHRLYLHCTIDTRLLTAEGTEQVRQEKLTKVNRYLRQLRIEEQADEILSCSPPPIDDEDEEQVVIENEENTQINKKNRTTRDRLIRNSPPPRPSQVAHRGDPDIAMKIAFSRQEIVGTAVMDLQSQQVLEYCTPRELLSEQRQEVLKQRSAKLHSQPKRQQKAQDKAEAVQQSEGKKSCSPYKPKINPKQLQLQPYRLINRWRRLRDQNIRDRQTEQQQGLYRPSKAEANLSQYLNRLLARRIIQRCQHWKVSIIVLPELGDLRESVESEIKAKAKQKFCDDNVYRQQQYKKEHRMGFHRWSYKNLSQCIRACAVEVGISVVPGRQPRLGTLQEKVIAVSSDRLPRPESVDSPAA

SEQ ID NO: 2006 - protein, 801 aa, synthetic construct
  REGION 1..801: note = Synthetic
TVLCKLGADEKVRQDFWQWSIKHTLLVNELLIQVSQHKDFEQWKNSGTITKKAVVELGKPFKDPEREQFIELPYRFHTSATLLVFYIYQSWLKLHQKHSYKLQGKKKWLAVLDNDLEVAKHTDFSPQMIQTQASEILSQASAQHEKSQQKRKKKSSKKSGETSKSHLAIMTILFDRHEQSQDLLERRAIAHLLKNGCQVNDAEEDLEALKLRLEKKRIQIARLEKQLERRLPDGRDPTGERFASNLAQAIAFADHLTFVPAKFWINWYQVLQRNPNDESDLVIPFLGYVYHQQAGDAGFDAWEQGDSERAALVSTLYETLPYPILFGSAGDVYWSLKQVDPNPGTTRQKQQSHRTPKRRRKPKHKQKVQERLCVRFKGEELKNHHFGVYCDRRQLPVFKQFLTDREVQKQRKDTEKFMGGIFTLRSARLVWKEDTERLQRKRASTTSLLWLKFLFAMQREETVTDKELDSWIISFLCINTIFPWQSHRLYLHCTIDSRLLTAEGTKEVIAQKTAATQQYLEQFKPETATPKPQAVERVEEERQTPQARGGTTVKKKETTLARSKNPPPARPSRLLYKGRSDIAAVVVVSRFAIVAVAIVNTQTQEILEFQKIKDLLTEHRSDVLEERLKKHQGMLKGGRSLEQLQLQQYRLVKRWRKHRKKNLTQRQEEQKRGLYKRSNQESNLAQYLNRLLAKRIVQLCQTYQVGMIVLPELGNIGENFECEIQAKARQKFPGDNVQLQKQYLKELRMRMHRWNYKNLLHAIRQYATPARIPVTTRWQPKEGALRDKAAVMARAVPPGVP

SEQ ID NO: 2007 - protein, 782 aa, synthetic construct
  REGION 1..782: note = Synthetic
TVCCYLCADELTRKFLWEVMEKHGLLINALLDQVGHSLEFEEWKQQGWLPDKALVEWCKALKQENQFKGFPSRFYISAQSIVKEMVESWVKLQKQLLGKSNGKKRWLKSVQEDIELSKITDLSPEMIQNRAKEILLELYQQENSESQSLESLEDNSQEDQQEDEGSDSQPSLFTLLFDTYDMYKVTEDFLSRRAIVHLLKNEGEVNEEIEKPEKLEERLVTKREEIQRLEEQLASRLPKGRDPTGEQALIFLEEAIQLPEHPNCYPPLFLFNVFYHYALLPTPYVQYTVYLLQKRLIEQKIVESEFLAWQESVDGRLANAAKITNSSLYPLSFGSTDDLYWLFETKEGNQQDPELRQSCEGTKLRKRPSKRKRKKLKTRSEERISVRFKGFGEFVFRVNCDRRQLPLFRLFATDYDTHKKLDKEHKYSLGLFAFRSAKLIWKEDKQLLHKKKTTKQANLEDINTSLEPTSLPPWKTHRLYLHCSFDPDLLTAEGTEKVRLRKIAETRKKLDNTKKKEQELLAQASADNLTEQERQELKYEAAKRRKGISAYETSLIQLNNIPPRPSKVPYQGEANITLGISLCRQELIGVAVVDLQTQQVLEYYSIRKLLTNRRVKKLRRNRSLLQLKLEKYRLVNRLRKLKRRNLVYRQKEQKQGQVVESNTESNLSQYLERLIAARIAQVALKWQASSVVIPDLEGMSEYIESAVQARAKQLFPNHREKQKNYAKQFRIEGHRWSYTMLTEFIRSRVLSEGISVKVGRQPVTGSLVDKSRKIALSAHSLA

SEQ ID NO: 2008 - protein, 747 aa, synthetic construct
  REGION 1..747: note = Synthetic
TIQCRLNTDEETRRPLWELMVEKNTPLVNELNKQVGECPEFETWQHTGNITQKKVEEICKLLKSDPRFTGQPGRFITSACLMTTYIYESWLALQKIRFTKLAGKKHWLGLIEEDVELAKISDFSLNTVCIKASEILAQALSQLAGNKAQGEAAGKRAKSRKRPKIDKNLLDTLFKLYEATEDCLDRRAIIHLLRNGCQVNEQEEDPESSALYLRKKQIEVERLERQLQGKLPQPRDPTGVETLKSLEEAKELPKHKNLTSLRLLLCAFIRNCYDMARNTQHRTESVDLGILLIRGCYIEIQRGEVEFETWRQELIPRLSNLAKIPKSLPYPIIFGSGDDLTWLFKAKENKAIPQPVDQSGMSPMVSTPLRRSKKRRKRKKVVKQSERIFVGFNGLGRCKLEIHCDRRQLPLLRQVAQEYQINKALPDTEKYSAGLSPLRSASLMWKEDKRKFGKRVSREAEKPWNTHRLFLHCSIETRLLSSEGTEEVRQEKIVGARQKLEHSRNKTELTKQSESRLKANQTELERLSRASPPRPSKPVYQGQSNILVGVSFSRRLPVAVAIVDASRGEVIRYQSVRQLLTDRSVQAPKGQQTIKQLRMKEYRLLNRLREQHKKTCNKEKNQQISQQSWSNLGQYLDRLMAARIVELALEWKAGSIVLPKIGDVRESIESEIRAIAEHKYPGDKTSQNRYAKQFRVSFHRWSYGRLAQSIQGCASRLGIPIEVGYQPAQGTLQHKAYELALSAYYAR

SEQ ID NO: 2009 - protein, 749 aa, synthetic construct
  REGION 1..749: note = Synthetic
TVECLLAASEETRQYVWSLMVQHAVLVRELLERAAQHPDFERWQSAGNLPAKAVERLAKESSNEEPPLLLEPRFSQLPDRFYKSAISTVQTTYKSWLALQHGRQQQRNRKQLWLDIVEDDLLTEYDESQLDSIIKKAHEILSQLLSEMKKEANETSEDKKVRRKKATKKKDKAQTDSEEMQEERKFISIYKLNKLYNSSTDAVTRRAIAHLVRNHSQVNEEEDPDKIPLEIEKTRIEIERLDQQLKSQLPKGRDPFGTQYQKNLEFATELPSKLSTSEEDVSEFIKWNAEEGQRRIAVMRLPKSLPYPISFGSNTDLRWFQETQERKTLKGKKTNKPRNQIIVRFQGLKNHSFKILCDRRQLPHFQQFVTDWKTYQELDRKGKADSEKCSASLFLLRSARLIWREDNRVPPKSLRKKKGKQKNNAVVASGKNVGSSSDNRKTEPWNTHRLYLQCSIDTRLLTAEGTEEVRQEEIGQIIKQLEGDSKDSRKKKAVTDNQELTAGQMADRKRKSSTLTRLNNKSAFSRPSKKPYQGQPDIVVGVSFSRHKPATAVVWDAKEDKILETQTVRQLLVDRKVQDKRGNQTIVQLKFQQYRLVGRHQRLRRNRLRRRNQERSRGMYQQSKSETNLGLYVDRLLAARIVELAIKWKAGSITLPKIENIRESVESEIRARAEKKFPGLKEAQDKYAKEFRISFHQWSYGRLDTAIRSKAARVGVLIETAWQPVSGDLQDKAKDLAQAAYYTRESAER

SEQ ID NO: 2010 - protein, 443 aa, synthetic construct
  REGION 1..443: note = Synthetic
LFKLYDETEQSTSRDKAAIIYLIKNGCKIPSCQENPKKFEENRLNKQKSIERIERKLEGKTPKIRKFPLYPIAFYSSDDLRWSLIKREDPKTKDIKERIFVTFKGMGRNRIFEICCGRRQLPIFQIFLEDWQLYQGNEKEYSLDMVLLRSASLVWRKCKESSSKEAANSLMDAYEPYLKVTIDIDNLTTEGAGVIRDEKLKDVERRIQNYGKLAEDKDLTPNQKTNLKQLKSRETGLGNCFPRPSKPAYEGNANIAIGISFCRQKVIAAAIVDLKKGKAIVYRTAQQLLGKDYSQIPEYRHRQRTNRNKRRKLQLQGKNASITEAGQGVHLNRVLAKAFVRLAEEYNAGVIVLPKTDGLREIIQSGIEAMAEQKYPKDKSRQRQFLKEYRISVHNWDYFRLRRSIEERAAKVGIPVKVGCQPSKGYLPQKAQQVALSVLERVV

SEQ ID NO: 2011 - protein, 783 aa, synthetic construct
  REGION 1..783: note = Synthetic
TIEALLIPSEWNPPIEEDSEPSEANNLESIAVASEAARDLVLQLALASTRLCKELNEQIGQHPDFEEWKENRKIPPKILKEIWNSLRATSSYGNVPYEDIPERFARSAWLRIESIYASWFKTQAKLLTRYYGLKRWLDIVKSDKKLAEICGCSIEQIQMRASQLLAEARVRLKEKRQAEKAEGKDKKQSQKGKKRSKAIEEPASTAESDNQSHKDPELETEHTLTDELFDTYFELVKSRSSLRDQCAIVHLIKNGCKIASEPENIKEFAKKCQGKRTRLERTEKQLSDRIPRVRDLGEEAERAFSNGIERVPLDNAEFEAQLADFQRKPNPLPYAVLFYSGDDVEWHLLKRKNPATHVLEKRIFVKFKGLKKYLKSRIRKELEKHIEEHLIELGLKLNDIRWRIAKRKNKTTQKLEYYISFGLKQPNTGLTRQLRERFEKIDLKNKYNTRKEYVFEVCCGQRQLQDFQIFLQDWQTYSANRDEYSIDAFAFEAAALVWERSVENGISTLQLYLKCTLDHKQLTAESAESVRNKEISKLTKKIANFEEYQTRGESLTGEQQTDLKRARSQLTALGNPYPRPSKPPYQGNPNIIVGVCFSRKEVATVAVVDCSTQKVLAYRNDRQLLGDDYKHLAAYRLEQRKNANERHKQQKRGKVSTLSESNKGKHLDRVIAKRVVEVVQEFKAGSLAMPDLTDTRESLQAELEAKAVGKYPGDRAKQKEYEKQYKINLHRWSYGRLIESIKQRASKLGIPIEQGQQPDEGDLQEKVVQIVWSAYHARQDTGT

SEQ ID NO: 2012 - protein, 693 aa, synthetic construct
  REGION 1..693: note = Synthetic
TIRARVVPSERTASRKTKKNVVFAYPSGKVKRETWKESVIVSNLIEDLRVAVAEHKDFESWRQEGKISDEELKKLWNTHRRSSPYQELPERLARSAWFVTGTIYDSWFALRQDLQLQIDKLTSWLRVAKADVELVEACGCELEQIKTRAHEILTAVKAQLEAKKSEPPAKTTGQNQPQAQTKTTQKKQSTTAATRSSKTASSLIDALIEKYTELKSSDPLSQCAIAHLIKNEGKVAKRRENIKQFLKKVNTKKKRIERLEVQLAGSLPKGRDLTGAKFVEALETATQQVPKDNDELRAWQASLLRRPKNVPYPILFHSSDDLQWCLLKRKDSITAIEVKDRIYVHFKGMESEQVFEICCGRRQLPLFQQFLKDWETFSSNRDQYSTSPFLLCSAALIWEERQDSGSKAPGQENSHPCDRYDLYLHCAIEHHALTEAGTELLIAQKSAAVNRLIKSYETKQETEELTEKQQEHLNKLQSQLKKLENPYPRSKKPLYKGNSDIVVGLAFSRKEVVTVAVVDGATGKLITYRNVRQLLGKNYSLLAEYRLKQKHNAHQRHKNQVQGRTRQITESEQGKYLDRLIAKAIVELARKHLAGSIAMPNVKGIRERLVSAIEARAEERFPGDVEKQDAFSKQYKINHHNWSYSRLAQFITDKAEQSEIKIERGFQPIDGMLTAQAEAVARSALERRKPHTA

SEQ ID NO: 2013 - protein, 561 aa, synthetic construct
  REGION 1..561: note = Synthetic
LQIDRLEKQLLSQLPRARNLFPHWAFEEALDDLLTLPDPDLARHNQYYFLAFSLLIHQSRSEQNIRFKQHLLKSMSFLWEKPNSLLYYRILIFSFLLYTTSTQKYLQFGHYLLQAIKVEAERVESQFYEWHELITPKLSEFLRKPKSLPYPISFGYEDVRAWQSNRSGKISFKLNGWGDLIFEVRCHRRRLPLIKTFLKDWQTKNNAEDEVEYSGSFMLLRSIELIWKPEESSEKSDSPLCSECHVFQHYPRKGFWNECKLSIHWTYDSDALTKQGLEKIRQHKLEPQLEKLKERQEELEKKKKRLSRLEKVPKDSRSEAQIKRIGNLKKAIEDLQAELDKPRPKLDVLQNSPLFDRPDRPLYKGVDNIFVGVLLDLDKHLVVTVVDAMRRKVLAIRNSRSISKEGHDLLQRYFHQRREHSKQRQVDQKAHRHVHKTESGLGEQVARLFAKGIVELAQQYKASMIVIPETDGWRDRLYSQLVARAKIKCNGSKKAMARYTKAHGEKLHQWDYSRLSQAIVGRATTDGLNVMQQKTVYEEDAFQQAANLAIAAYDSLNSDET

SEQ ID NO: 2014 - protein, 825 aa, synthetic construct
  REGION 1..825: note = Synthetic
TIRTDAIVRTSKPRQSKKAIDDLVSFDEAAWCCVCEFGYKHTLLVDTIIKQIKQHHKLLNWIHISQELQKQDETTQEPEAKQRQNWLPKGLVKTLCDALARTSQFSKMSGRFYTSAIERVEEIFKSWFTSHRKLIQRIGGKRRWLAVVESDAALAETSNFSQQEIEQRAAQILAELEAKDELTDASGDRPPFDFLFKQFDATEEVLSRRAIIHLLKNGGKPQAEVKEPRKSKSKSKSKSKSKPAQPLTLTERLEAMRVGIERLEKQLLEQLPRARNLFPKQAFEHHLEAVIAMPNSDATELERYYFLYFSLLLYLSDSNEYIQLEQHLLAALVLQWSKLGDLHYYLDLIDSFMLYAASEQQYLQFGFYLLQTIKLEAERVEATFFAWHESITPKLHDFLREPKALPYPMSFGYDGVRSWWMNQKGKIFFKLNGWGDLLFEVRCHRRQLSLIKTFLKDWQTKNDSERKAQSSKKDQFTGSFMLLRSIELIWKPIKASEQKDAQLCSQCKIFQQYGEKGFWHECTLTIHWTFNAEALTRQGLEKIRQRKLEPQLKQLQAKQATLEQKQDLLNKLEQAAPEASKSQDQLKRLGNLKKQIQQLQEELAKPRPKLDCLKAAKPFERPDRPLYEGVPNIFVGVLLDLDKHLVVTVVDAMRRKRLTLRSAPKVSPEGHRLLQKYFRQRREHSKQRQTDQQVQRHNYQTESDLGQQVARLFAKGVVELAQAHKASTIVIPVTDGWRERLYSQLIARAKLKCEGNKQAMDRYTKEHGKQLHQWDYNRLSQAIIDCAATHGIEVVRQKTVFETDVFQQAANLTITAYDSLNSAQM

SEQ ID NO: 2015 - protein, 658 aa, synthetic construct
  REGION 1..658: note = Synthetic
TIQCRLTASETTRRYLWELMANFNTPLVTELMQVIQHHDDFTTWRQRRELPMQVVRNLCTLLRLDERFSGQPGRFYSSAAMMVTYTYDAWFALQASRQQRLDGLKRWLGILKSDADMLELCGLDWDSFQSSAREILQSVTDQLQADQPKPSPSHKGSQQRREQSDKIVSKRQLANRLFQLYDESSSLLIRCVVVHVLKHGCAVSEKPEKPERYQRMLLSKQKAAKRLEEQLTSSLPKGRDLTDETFLKALELLTYQIPDSAEELAQWKAQLLRNPNPLPYPILYGSNNDLTWFIEERPRGKAKPPKQQICVKFNGLGKHVFRVQCDRRQHHHFQRFVQDWDVYKRGKGLISGSLLLLRTASLLWKPANQSSHQPTGHPWEDNYLYLHCQIDTQLLTQEGIEQKRQKKLKSTQNPDLSPPDPTSKVAKQRQGNVNRLQSIEQYPISLPSRESYQGQSHLILGVSFALRHPVTLAVVDLQSKQALYYRSTRQLLKTTDAKTDQSHLLRRRKIQQQRHGHERHKALKQDHYAPYQEANLGTYLNQVLAKRVVDAAYRAQASAIALPETKGLRDKLEAQLRARAAIKIVGSAAAQKRYARAASLRLHHWSYNQLTEQIKSKAAKLGIPVEVVPTLVGDSPQETARDVALFAYYRRQAAVKPN

SEQ ID NO: 2016 - protein, 694 aa, synthetic construct
  REGION 1..694: note = Synthetic
TIQCRLIATEETRRSLWLLMAERNTPFIYELLNRVSQHDDFEAWQRSGRLNTDALKKLWKSYKDEFPPKTQPGRFYTSAKLTVQHIYESWLALQKKLRLRLDGKQRWLEMLKSDAELIELSECSLDEIQVRANEILAKTVVQLRSQGNQDTTIQKVDHKNSSDENDKNERSKSKRKLSDLLFEAYASAEDSLSRCAIVHLLKNSCKVGEQAEDLKKLSETFHKKKKEIQRLEEKLACRLPKGRDLTGDAFLKSLETSISLPKLPDSSVEDSREFLQWESEILSQFPILAKKPNPLPYPIFYEINEDLTWSKNEKGRICVKFNGFGQHIFEVYCDHRQLHYFQQFLQDQQTKKASRGEHSTALFLLRSAHLIWREDEALSEKRLKINKKKARKRGEPQSEQLKCPWNVYYLELQCAIDTHFLTAQGTQQIREQEKPKIKKSIEKKEKEANLTENQLIRLKSSHTSLSRLSSAFPRPNKPPYQGRSHILVGVNLGLRSPATVAVVDATTGDALAYRSTRQLLTDDKKLRGPNQPEKHLRLKNYRLLNRYRQQQQCGPRQRRQNQQRGIYRFAKESGLGQHLDRHIAKAIVSLAQEYQASSIVLPDMSGLRERVESEIQARAEQKCGSKEAQKKYAKRYRASKPSWSYDRLTQSIKGRAAKFGISVEIAQQPAQGSPQEKAKDLAIAAYHFRQIALG

SEQ ID NO: 2017 - protein, 721 aa, synthetic construct
  REGION 1..721: note = Synthetic
TVRCRLVAGVKQKIIGKSIKNFSAEEQILLQSLLDEKIQFELDENKDKDAKVKAKIKKNTFITLAESSEDVRQQLWHFFLTSSAMTDELLDRLSKHDSFQTWRQQGKLPDDELKACWLDLKNSPIYDRKLPGRFFSSVHSMVGNIYKSWLALNQAKQLQLDGLKRLVKIAYSDEVLLEMCDCQFEQLQAKAESILALIDREISESEESPSRIKLLFKKYPELPEADILSRSAIAYLIRHGCKVESEIEPTPKFKKWYKTKLKRVRRLETQLAGHFPRGRDIQNKALTSCLETTNRDDFTDNLEYLLWNKPISGNPPSLPHPIEFNTNTDLRWLKLYRKQYKCKHTASGEPIDSIELTQRLFVEFNGLTQGYNYIFEVYCDRRQLPLFQRFVKDYQLNLKPKKKDNQSQEKYSSGLFVLRSAHLLWERQEFQNRYRHKTLTTQTANEPWNTHQLYLHCAMETDLLTAEGTSKIQQQKIQKASNTIAKQLKNDNPSVKQQQSLKKNQTSLAALTSSLPRPSIQVEQVNPHIIVGLIFDPVRPIYLAVVDVITGKTVACRSTRQLLGDKYPQLSEYRLKQQHNSRHRRKQNQRGQFYQPTESTQGEHLDRILAKAVIQVAQEFKAASIALPPVDNSIEKIQSVLEADAEEEIPEDSGTQQKRTRKTSVVIHKWSYNRLSGYIRSNAAKLDIAVEMGALPSPGTPPLQATAIAMSAYNSRKHIKK

SEQ ID NO: 2018 - protein, 708 aa, synthetic construct
  REGION 1..708: note = Synthetic
TIQCNLVASEETRRYLWSVMVEKNTPLINELLKRVKQHPDFEKWRRRGKPSKEAVRELCEPLRNDPQFNGQPGRFYTSAIATVQQIYESWMATQLGLQRSLDGKVHWLEVVESDAELVTQSNVDADAIRAKAREILLDIASGCLPQKTQEKKAKASQNKEKPRQGKKKQKEKPEVPQNLVGVLLDFYDETKEVVKRRALIHLLRNDCEVNEKEDAKKLIDKLNNKRAEIERLKERLEGRLPKGRDLTDQDFLEALEIATSIPADDTLSEFLAWENKVIPNLPKLVKAPKSMPYPIYYETNTDFNVWKRNEKGRICFELNGLSNHIFEVYCDRRQLHFFEQFLRDYETKKTGGKQHSTGLFLLRSAQLLWCEDKTRIKKVKVQNPLGGKAKKKAEKTKIVEPWNYNYLSLHCAVDTRLLTEEGTQQVREELKEDIAETLERQRTKLSNLSDEQVEEKKNLRQSIQSKESTLSRSSGSFSRPSRIPYSQFSRSNVLVGVCFEFHNLVTVAVVDASQNQVLAYRSTRQLLTNERVEIPEAAEGSAKRVSRRLRYQNYRLLNRHRQRQQRNARQRREDRKRRIYRNSPKSQSGQHLDRLIASSIISLAQKHRAGSIVLPETKGLLERTEGKVRALAEQKVPDYKQGQEKFAKQHRKRYNRWNYARLLQTVQQQAAKLGISVELGRQISEGSSQEKARDIALAIYHSRQVVDA

SEQ ID NO: 2019 - protein, 715 aa, synthetic construct
  REGION 1..715: note = Synthetic
TIQCRLVADEETRRHLWHLMAEKNTPLVNELLDLVSRHDDFEAWRRKGSLPGNAVKLLCDPIRQKPPFEGQPGRFYSSTIRIVQQTYEAWLALHRTKQAALDGKKRWLQIVESDAQLAAVSAFTPEVICAKAREILEQISAASHSSHPVAVKPKKSRKSQKAAVGASTISSLFERFHTTDDILSRRAIIHLLKHGCQVREEEDPDKWVQRLAKKRIEIQRLEEQLKARHPRGRATTEQDAERQRLKAICLPKHPGLMCAINLTWALLCDPILSAKYIHFVFTFLLKRVCQFEEARIHFEFFDWEEDFATNRLELVRSPKSIPYPILYGAEDLIRWHRNDKGRICLSFNGLGKYMFEVYCDRRQLLLFELFLKDGQTFTAKENKKQYSGSKLLLREASLLWIEPSKSLSKRKLFRIKRNRIRAQRSGAGSLQTCEEDSEPWNRYRLALHCTFNAHALTQEGTKRICQEKLTARDKVLEKLNQQSESDLEQTQTLQRERVKQERLESAKDFRRSDRALYRGDADVLVGVSFNLADPATVAIVRGSTGETLAYRSLRQLLGQNYKLLNRQKQQQQQHDKQRRKNQQRGLSTQLSESELGQYVDRLIAKAVITLAKQFKAGSVVLPNLKGLRERIQSELAAKAEQKHPGNRALQSSYAKDYRRQVHRWSYQRLAQNIQSQAAKANITVEIGQQPLQGSAQAKALALAISTYHARQLSQA

SEQ ID NO: 2020 - protein, 306 aa, synthetic construct
  REGION 1..306: note = Synthetic
LPFFQSFLEDWQAYQANKGTYPAGLLTLSSALLVWREGEGQGAPWNVNHLALYCTFDTRLMSAEGTLEAQQEKVAKTLKKLTHPNPDPRNHSTLDRLQNLPERPSRTPYVGNPEILVGISIGLADPITVAVVNGRTGEILAYRTPRALLGEQYHLLNRHRKEQQHRLQRHKNQQRGVAYQPSESELGQYVDQLLANSTIDLARTYQAGSIVVPNLKNVRDLLASEIQARAEQKCPGSVAAQKQYAKAYRQAIHQWSYNRLIQAICSQATQRGITVEVGSQPLKGNPQELAKDIAIAAYYARAITAK

SEQ ID NO: 2021 - protein, 640 aa, synthetic construct
  REGION 1..640: note = Synthetic
TIHCRLVASEPIRRHLWHLMAESNTPLVNELTKLVSQQEDFKIWQSKGTISKKIVTALCEPLREVYPGQPGRFYSSAIAMVLYTYKSWLAIQNNLRYRIDGKQRWLNVVKSDRELHELSGSNLDVIKQKAQEILDRLNAVTNEVESAPNAKKRKKAKQKAKSSNDDNLMSKLFTAYDDTEDTLSKCAISYLLKNDCKVSEIEEDPDGFAHRINRKKEQIEQLEAELNARLPKSRDLSGAEFLETLELATYQISENVAQAKEWEAKLETKSASLPYPIIYDSSGEVRWGKTTKGRITVNFNGMDKYLKAVDPDIKEWYKVHQENPFQLYCDRRQLPLFQRFWEDWQAYEPNKDTYPPGLLTLSTAMLIWTEGEGKGDPWNANHLALHCSYDTRLMTAEGTALVQQEKSDEALKNLEGEKPDPRKRSELARLQNIPARPSHKPYQGNPEILVGLSIGLANPVTAAVVNVITGEVLTYRTPKTLLGDRYRLLNRHRTKQQQNILQRQKNQKRGISDQPSESELGEYVDRLLANEIVKLAQQYRADSIVIPSLTHLREVLNSEITARAKQKCPGSVEAQNKYAKEFRMRISRWSYNRLIEAIRSKARRLGITIESGFQPVRASPQERAKDVAIGTYHSRRNSAE

SEQ ID NO: 2022 - protein, 639 aa, synthetic construct
  REGION 1..639: note = Synthetic
TIQCRLVASADTRRHLWHLMADANTPLITGVIARVNEHADFEMWQRRGHLPPGLIYSWVKDSGSSPPYAGQPAYWYLSIVHTVEDIFSSWFALQQRTQRARDGRCRWLEILRDDAQLAEASSQDIGDLRRAAGAALDRIAPKTVGSQKAIDTQLYRALFAAYDIATDEPARCAISVLLKNGGAVPDGEENTERLAARRRATEIRIERLEAQLAARRPRGRDMSGETFLHTLTDVAKMVPEDEAQARSWQDALLREPDNLPFPLVLLDNGKMHWTRGEDKRLRLVLAGMKNHPLAIYGDRRQMHLFDRFAEDQHVQRETHGSSALFTLRSARLAWREDSKRRQGAPWERHRLVLFCTVDTRLWTREGTEEVRREKMDRVAARMARMEKKVDLSETQRGYKRRMESTLCGLDGYNGRPSKPPYAGRDPIVVGVAVGMDRPATVAVVDTIHGAVLAYRSTRQLLGDDYRLLERYRRERSEGDHRRHAQQRRGETPDVGESELGRQVDRLLARAIVDVARQYHAGRIIVPQVGDVREAVEGDMRARAEAQHPGYKDGQKMYAKQYRMSVHRWSFGRLLGSIRMAAQRAGIIVDEGRQVTSGTVQDRARDVALNAHMVPRSLTYVATHNNVLWSLGTLTSKLGE

SEQ ID NO: 2023 - protein, 495 aa, synthetic construct
  REGION 1..495: note = Synthetic
VLLPTSSKTAIKFEGEPEDKEAYLLRRTQKEIQIQRLEAQIHSCAPHPRLNDDSLWLDALNQSLTGITEVKDLQQIQRQLLQKFPHLPYPVFYNTNTDLEWSINHQGRIRVSFNGLKKKGITLEIACDERQLPYFQRILSDYQCFKRKDLPVPVPGGLMLLRSAQLIWKPIEGKGQPWNTHHLYLHCAINNQLWSKTGMANIQQELIQETQKQLNKCFAKEEQNPLTNNQKKNILRLESSLQRLKTFDIAYLNPFQSHSYQGNPHIIVGVAIGLKTPITIAIVDLQTQATLGFRSPKQLLKRRRQILVAKAKTEDKIRFSPRKKREITDYELFQDYLHKKHSNKHERHKAQKKFADTQFGEANAGLYFNRLFAQAIVEVAHSYQASVIVLPDLTNIREAIESEVRARAELKYPGNKTQQQRYAKDFRVTVNQWNYNQLGQCINYAAKKAGLKIAILKQTIKGSSQQKARQIALTYWEKQQQTQTPFNVQTPNNLV

SEQ ID NO: 2024 - protein, 656 aa, synthetic construct
  REGION 1..656: note = Synthetic
TVVQCRLIAPESTLQHIWKMMAQQQTPLINQLLHDINTHPDINTWLTANQLPSKLVETLAQPLKTQSPYQGLPGRFITSAIILVKEMYASWFAIQTQKRLSLEGKKRFLTILKSDKQLIQDSQTDFLTLCYKAQQLLKRTQNKLKLDEPQHSEKAHWSIINALYPAYNNAKTPISRAAFALLIKNNGQVPDTPENPDYYQQRRKRKEIQIRRLEEQLKASLPKGRILDSKHWENTLKLAQTPITTIEEITSLQTQLLQKYSHLPFPVFYGTNTDLTWFKNPQGRICVKFNGLNQYPFQIACNKRQYPWFQRFFTDYQSYKSHKQQVPTGLMVLRSARLLWQPTNGQGEPWNTHHLSLHCAIDNDLWTISGIQQVKQQKILQTEQKIANFHSKALEKELTPNQQQRLKASQTSLNLLKTFDINEFFPSKCSLYQGSPDIILGVSIGLENPATIAIINISTQEILTYRTTKQLLSRTRKVRNKKPNSNNSNQSLSSAYKQISNYELFLQYQQQKHHNQHQRHNAQINDANNNYGEANLGLYLNRLLAKAILELAQQYQVSLIILPSLKNKRELIESEIRAKAELKYPGCKEKQDSYAKDYRTNVHQWSYQQLIKCIESKAAQIGIDTATGKQMNLETSQDQARNLVLNFCQKFSPTQV

SEQ ID NO: 2025 - protein, 700 aa, synthetic construct
  REGION 1..700: note = Synthetic
TIQSLLEAPEETLCFLWQLMVNVTELINSLLHHINTHPDFDIWLTQCAIPASVINSFIKTAKTQSPYREMPTRFITSAQNLVNEMFKSWFEIQRLKRLSLKGKRHFFTILKSDEELQRESDCTFDTLCQEAAIILQQTQLQIEQKRLDANQPPPTLDKQAFWEVAHVLYKAYDQADTPLVRSGIALLLKNQNQVPEQFEDPKKYQQRRQAKQEEIERLEHQLQSKAPKGRLTDQQEWLRILEKASQPITEVAEFRDIQAQLLRKFFALVYPVTFSTNTDLQWSTNQQGRICVQFYGMSKYTFEIACDRRQLNWFKRFLADYQLYKQHKTQIPTGLMPLRCARLVWTEGQDDFALIVATWLLIAVIQHKFYHIAWLLLKNHRIIKSPPWRVHHLHLHCIVDHRLWTQEGKEIVKAEKIPQTEKLINDFQQKERIQENGLTTGQQQRLKASETSLRLLQNCDHFAASKRISYRGQPNRILGVSIGLHEPVTIMIVNTTTGKTLASRNTKQLLDKKRRVRDQQPELPKYEERQHFTNIYKEISDYELFLFYRQQKQQHQHQRHKAQIKATPDHSKEANLGLYINRLLAKAIIEFAQQHQVSTIILPDLKNKRESIESEAKALAKLKIPKDKSRQQQYTRNILSEVSQWSYKQLSDCIINKASQSGIAIEIIQQISQGNPYQKARNLITTFTKNSGNKCSAKIE

SEQ ID NO: 2026 - protein, 638 aa, synthetic construct
  REGION 1..638: note = Synthetic
TIQCRLVAPEETLRHLWELMVEKNTLLVNELLQQLRTHPNMEGWLQEGGIPAEVIEGLCKSLRAESRFQDMPGRFANAAENLVKYIYKSWVALQEKRTRTLHRKQHWFSLLKSDLELEQESGLSLEKLRTEATKILTKEKASLECSPEAEADQATTDNSAALWENLFTAYDKSKSVRRRCVIAYLLKNNCQVSDVEEDPEAYQLRRRKKEIEIERLKEQLKSRLPKGRNLSDQEWLEALEEAQGLILDDDELREVQASLTRQASSVPFSISYETNTDLRWSRNEHKRICVSFNGKGISKHTFEVFCGQRQLHWFERFIEDYEIFKHNEEQVPGGLLTLRSARLVWQEGEGKGEPWQINRLLLHCSVETRLWTAEGTEEVRAEKIAKRQKIIDSMKAKGSQSSKLKDYQTSLELLKTFRGFSRPSRVSYKGNPSIVIGVSFGRAKPATVVVLNVETGKVLTYRDVKQLLSKPIKEGRTKKKKTQYEQLNRQREQQRLNSHERHKAQKNGAPCNFGESNQGEYVDRLLAKAIVEVAKQYRASSIVLPNLSNIREANESKVRARAEQRFPGNQKLQNQSDKDYRASIHRWSYNRLSELIQLKAKKAGIATEKAQQPPGDNPQEKARNLVLAACEKRKVSAS

SEQ ID NO: 2027 - protein, 659 aa, synthetic construct
  REGION 1..659: note = Synthetic
TIRCHLHTKEDVLRKVWEEMTQKNTPLIVELLKSVSEQPEFETNKENGKITKKEITNLRKSLTQDSGRLYSSVDNLVQEVYSAWLTLYQKRKKQKEGKEYFLNNILKSDIELVEESNCDLQILRAKAQEIISNPQDILRQITIDNPKDKPTKSIQKRVRKNINASNSDTAKNNILNSQEKTTEENISKSVIEILYEIHKTTQDTIIRCAVTYLIKNYTKISDTEEDLNKLKERRAEKEIEIKRLEKQIQDSRLPNGRDITGARYLEAFDKLINQVPKNNEEFANWIADASRKISNLPYPIDYLYSDLTWYKNQDGKIFVYFNGWSKYHFQICCNKRQRHFFERFLEDHKAWKESEKGEVKLSGSLVTLRCVQLLWQQGEGKGEPWKVNKLSLHCTYDTRLWTAEGTEEARKEKINKIQRQVEQAEETENLDEQQQKQLKKNKSSLSRLNNSFNRPIQPIYQGLSNMIVGVSFHPVELATVAVVDTTTQKVIAYKTINELLDNAFHLLSRMRRQQIHFRKERKKAQKKDSPCNLGESKLGEYVDKLLAKRIVEVAKEYQAICIVLPKLKDMKEIRTSVIQAKAETKFPGNVNAQKLYVKEYNRQVHNWSYNRLQESIKSKAAELKISIEFGIQLSYDTLQAQARDLALSAYQCRIHTIDR

SEQ ID NO: 2028 - protein, 363 aa, synthetic construct
  REGION 1..363: note = Synthetic
TIQCRLVAEEGTLRQLWEWLKNDKGRLFVRFNGLGKLTFEIYCDKRHLQYFQRFLEDQEIKRNSKNQHSSSLFTLRSGRLAWLPGEEKGEVWKVNQLNLYCSLDTRMWTTEGTQQVVEEKVTRITNTLTKVKQKDDLKDEQQAFITRQQSTLDRINNPFPRPSKPNYQGQPSILVGVSFGLKKPVTVAVVDVVKNEVLAYRSVKQLLGENYNLLNRQRQQQQRLSHERHKAQKQNAPNSFGESELGQYIDRLLADAIIAIAKTYQADSIVIPKLRDMREQISSEVQSRAEKKCPGYKEAQQKYAKEYRMSIHRWSYGRLIDSIKSQAVKVGISTEIGTQPIKGSPQEKAGNLAVFAYQERQAT

SEQ ID NO: 2029 - protein, 764 aa, synthetic construct
  REGION 1..764: note = Synthetic
TIQCRLVAEENTLRQLWKLMAEKNTPLINELLEQVGQHPNFEKWLKKGEVPEEAIDTIKKSLITQKPFAGQPGRFYTSAVTLVKEIYKSWFTLQQQRQRKIEGKERWLKMLKSDIELQQQSQCHLDIIRNKANELLTSFVANITDNRNQQSKKKDTKTKKNKKVSEDSTLFNALFALYDQTKDCLSQCAIAYLLKNNCQVSEIDEDPEEYVKRRRQKEIELERLKEQLKSRKPKGRDLTGEKWLTTLKEATNQVPVDQLEAKSWQDSLLKVTSDIPYPVDYETQTDLDLLIHSNDDINQNTILVWQIGFLKQLIESGSYSFIKYLYFQSEFLPNRENIILVWQIGFLKQLIESGSYSFIKYLYFQSECLPKRKHIILSWQIGFLKQLIESGLYSFINYLYFQSGWLYTRDVNWLKLKNKPGRIFVKFNGLKKNIINPEFYICCDSRQRDYFQRFCQDWQIWHDNEETYSSGLFFLRSARLLWQKIKGRGVPWRVNRLILQCSIETRLWTEEETELVRTENIGKAEKTIRKMEQQAVLTQQQLSRLQGERTQRQKLNNPFPGRPSKPLYQGKSNIIVGVSFGLDKPATVSVVDIANKKVLAYRSTKQLLGKNYNLLNRQRQQQQRLAHERHKAQKRNAPNSFGESELGQYVDRLLADAIIAIAKTYQACSIVIPKLRDMREQITSEIQSRAEKKCPGYKEAQKKYAKEYRKSIHRWSYGRLIENIQSQAVKAGIAIEIATQPIKGSSQEKARDVAIFAYQERQAT

SEQ ID NO: 2030 - protein, 683 aa, synthetic construct
  REGION 1..683: note = Synthetic
TIPCRLVSHEFSRYCLWKLMADQNTPLISELLALVGNHTEFEAWQQQGKLPAKLLRNLCDSLESDPRFEGQPSRFYSSAVATVNYIYKSLFAIQQKLRCDRERKSYWLSRLESASSFIQTNKVSWSDLYRKAEKILATAIAQDSTDEAQQRNGKKKKKDKIPRKLATILFGFYNQTEDPAERCAITCLIANACCLRKPEEDLPDFTELRREKEIEIERIQEKLKTSRLPQGRDLTGKDWLEALELATFHQLDDEQHEAVQANLLRESSSLPFPVSYESTPDFTWSRNDKGRICFKLNGLAKHHTFEVYCDRRHLHWFERFLKDQETKHNSEDKLSSSLYTLRSGQLIWKEGKVSKSSSLAPSLFKWLFYYGFQILRSLPEVSLWQYRELKLGLLAYLLLKNRKREPWNVHHLHLHCAVETLLWTAEGTQQVANEKAARADKTISKMEEKEKKGELNEAQQASLIRTRSMREGLNNPFPRPSQPLYQGQSNLVVGVSMGLDKPATVAVVDVKTGKVLTYRNVKQLLGKNYKLLNQQRQRQDRDARRRHEAQKKDAPNQFGASKLGQYVDRLLAKAIVAIALTYKASSIALPKLGEVRERVNSQIQARAEKECLGHKKSYQKYGKQYRTRIHSWSYGRLIENIQQAAAEVGIAIVEGQQPSQGTPQEKAGNVALSAYQNRMRAVS

SEQ ID NO: 2031 - protein, 678 aa, synthetic construct
  REGION 1..678: note = Synthetic
TLECRLYAPSDTLRYLWLLMAEKNTPLINEIINHLSEHPDFDQWFKAKQIPKSAISDICNDLKSQENYQNQPGRFYSSAISLTHYMFKSWFAVHKQLQRRIEGKRRWLNLLKSDQELEQNCGQSLEIIIQKAEEILKLMDSEKSQSSSKPKKPKKPKKKKKSSSEETITLFDRLFKAYNQGNDSLESYALAYLLKNNGQIPEDDEDLDKFALRKRKKEIEIERLQQQLENRIPLGRDLTGELWQEMLTIVNESIPQDENEASAWQAKLLKKSHNIPYPVAYETNTDLKWSKDSRGHLLVTFNGLVESLKKLNLNPEFEIRCDRRHLPWFQRFCKDQEIKANNDQHSSALFVLRSARLIWREGQGKEDPWKIHQLYLQCSVETQLWTEAGTKQVQSEKMVEFQLNQLRMKPELTFPIFFRSQSLPTYFNLWKVITSYRILKFLEKGDFTKAQKNFQDAIKRTESCLENLQSSYLTSQKSLYQGNPEIIMGVAMGLSQPATIAVVNVVTQEVLTYRSLKQLLGKNYNLLNRQRQQKQKLSHQRHKAQKKDAFNQYGESELGQYVDRLIAKAIVQVAKEYQADSIAVPKIRQMREIIQSEVQARAERKIQGYKEGQKKYAQQYRENVHQWSYGRLIESIHQASAKFGIRVEIASQSYQGSFQEQAQNLAIAAYTNRLEAVG

SEQ ID NO: 2032 - protein, 603 aa, synthetic construct
  REGION 1..603: note = Synthetic
TICCQLIAPEQTRQRLWQYMAEQYTPLMTELIRQVGEHPDLSQWQDKGKMPSNIVKDLCATLKQIRPFTGLPSNFYQSAINQVNYIFASWLASQHKLKLRLNGKRYYFSMLYSDQDLVKNSGHTLTEIRSQAQIILNQISNKKTEEKHKYLFQHHRESSNILGKTAITYLIKHNQKIPTEPEHRDKFEKLYRKTQIQIEKLEKQIEARLPKGRNLSEQQWLNTLITASQNVPKDENEAKLWQKYILTDSNSLPYPVSYETNENLVWSLDEQGRLNLRFNGLGKLTFKVYCDNRQLHYFQQFLQDQTIKKSGKNKHSSGLFLLRSAMLVWKPNESKGKSWNKNTLHLHCAIDTRLLTLEGTQEVREEKLTQVTNIIQSMEKKPSLNDNQKQCLKRKKTSQKNLHESFLRPSRAKYQGNPNIIVGVALGLKHPVTVSIVDMATQKVIAYRSTKQLLGKNYKLLNRYKVQKQRQAHQRHVNQRQSSSVSFGDSNQGKYLNDLLVGAVMDLATQYQAGNIVLPKLDHIREIVESEIKVKAEKKIPLSVDLQKKYAKTYRMSVHQWGYGLFIDGLQNQAKRLSISIEERKQPIRGSPQEQSRDLVLGK

SEQ ID NO: 2033 - protein, 730 aa, synthetic construct
  REGION 1..730: note = Synthetic
TYSFRLDALGKTPKAREEVRRYFWELMIQQHTPLINQLNLQVAQHPNFANWQNNNAVDADDLKRLWRSLKKQPQFETMPERAFVSARLVTNNTYESWLALQAKRQDELNKLLHSIEVLKTDVELIAISGCDLDVIRNRAKEVLSEANAQISEDSKKKSKKAIEGGIYKILYDKHRITDDLLEKCAVAYLIKNRFKIKSDETEEDVKKLGDRIHRKQKETEILQKQLQSRLPKGRPWVGKDILDEIASIGVVEDETEWNSIESALLKKQTFLPHPILFESSDDLIWAEPERCQIKDIQPDEENSKDTEIEGVKAKNLQAGKENSNTEPRKRVCVCFKSFDEKYAFEVAGDYRHIHAVRQALEERKIYDEDTTQNTSALFLVRSATLIWREYKKNENRIVRRRKVANKRANREGQSADTKPDSLPAPEFYDPDFPWNRYQLFLHCTIETRYLSKEGTELDIEKQKKSTAKTLQTLEKNIAELEGKGESTKTRKDRHSRQSGTLRRLENYDNNYERPSKPLYAGQPHIVTGVALGSSGLTTATIADATSDKILECRGLKALLGKNYELIKRRQFERQLNLRRRTQNQKRGANDQFGESNLGDTIDKHTANAVIDFAKKHQSGCIVLPDMNDYRRRKQAEIAAFAERECGGWKGIEKKFAKAQNEKIHSWSYERLIKYITNQAEKEGILVKIGRQPLQGSSQEQGKQMAIEVYKAIEAYKNKAKSEKSPSNKSA

SEQ ID NO: 2034 - protein, 623 aa, synthetic construct
  REGION 1..623: note = Synthetic
TIQCRLVASADTRQFLWMLMSQKNTPLINEIFMRIAEHPDFSVWKEKGKLPKNFLAQQIAELKEDKRFQGQPSRFYASVHKMIDYVYESWFTIQDKNKFRLQGHTRWLEMLKPDTEILQCFDGSWEKLQNQAKKILDEIDSTLSHTRIVDKLFKEYEATNDPRIQGAIVYLIKNGASIPDNKVETEKKYKKLKRKVEIQVHKLKKQIEISAPTGRDLNQQKWLDTLILASLASTTMPLNQAQCDRWFSALKKNSPSIPYPVIYETNEDLKWSLSDQNRLHVRFNGLSDHTFKIYCDSRQLPYFQRFYEDQELKKANKNQFSSALFTLRSAMIIWKEDDGKGELWDKHKLYLHCTLDTDYWTVEGTQVVAQRKQKEVLNIIDGMKEKDDLRDTQKKFIQRKETTLARLNNIFPRPGKPIYQGNPNLFLGVAMGLQESVTLALVNVGEGKAILYRNIKQLLGDNYHLLRRRRNEKQKLNHQNHKARKRASFQQKGESNLGEYVDRLIAKSILKIAQEYKVSTIIIPLLSQMRSITEAEVQARAEERIPEYKEGQKKYAKDYRVQVHQWSYGRLIDNIKANSAKVGIVVREGKQPKQGTFTDKALQLALSIQQNITEGKIPRNTKF

SEQ ID NO: 2035 - protein, 418 aa, synthetic construct
  REGION 1..418: note = Synthetic
IAATTVPKDNKEARIWQDKLLTKPKSLPFPITFETNEDLKWSSIDKRFLIWLIFFFSIKNQFGFSLLFLRLSSYLNSQRDRLFVKFNGLSQHRFQIYCDRRQLYWFQRFLEDQQIKKEGKNSHSSGLFILRSAQLSWREDKKKNTGKPWNDNRLVLFCTVDTRFWSAEGTQVAREEKRAKILKTIDNMKKKGELTANQQAFVQKKHTTLAKLHNLFPRPSRKLYQGKENIVLGVAMGLSKPATVAIVDGNTGKAIAFRSIKQLLGKNYRLLNRQRQQKQALSRLRHKAQKRASDNQKGESNLGEYVDRLIAKAIVKLAKEYQASAIAVPKIEDMREIVQSEIKAKAEAKIPGYEEGQKKYAKQYRINIHNWSYGRLIENITNQASKSGIAIAEVKQSVRGSPMKNALSIAIAFYNKNT

SEQ ID NO: 2036 - protein, 651 aa, synthetic construct
  REGION 1..651: note = Synthetic
TIQCRLVASAETRQHVWELMAEQNTPLVNELLKQVAEHPEFETWQQKGKLPAGIVSKLCKPLKEDSRFSGQPGRFYTSATKLVEYIYQSWLALQKRLQWRLNGQKRWLEILKSDQELCQQADCSLETLCHKASEILASFQSSTTKSKKKSKKQKNSSRKSLFDAYDSAEDSLTRSAIAYLLKNNCKIPEQQEDPEKFTQRRRKAEIKVERLTRQIDSSLPKGRDLTGERWLETLITAANKVPQNIEEFKSWQNILLTKPKSVPFPISYETNEDLTWSKNEKGRLCVRFSGLSDHTLQIYCDQRQLKWFQRFYEDQETKRASKNQHSSSLFTLRSARILWQEGTAKGQAWHRNYLSLYCTVDTRLWTAEGTEQVRQEKTDEITKILTNMEEKGDLSQTQEAFIKRKQTTLDRLNNSYPRPSKPLYQGQSHLLLGIAFGLEKPATIAIVDGTTGKAITYRSIKQLLGENYKLLNRHRKQKQVQSHQRHKNQKKFAPNQLRNSELGEYIDHLIAKAIVNIAQKYKVGSIVLPKLDNIREVIQSEVQMRAEQKIPGVVEKQKEYAKQHRIQVHQWSYNRLIESIKAKANQKEIVIEQAKQPNRIQVHQWSYNRLIESIKAKANQKEIVIEQAKQPIRDSSQEEAKELATIAYKSR

SEQ ID NO: 2037 - protein, 609 aa, synthetic construct
  REGION 1..609: note = Synthetic
TIHCRLTASESTRHQLWGLMAEKNTPLINELLRLLSEHEDFEQWCEKGWLTAGLIKKLGDELRQDNRFQGQPGRFYTSAISHVEDIYKSFLRMQNQLRFRLKGQERWLHMLKSDRELAQAAEVSLDDIRRVANDIIASYPSEEDNLSQKFFDAYGVAEDILTQSAICFLIKNGCRVQKKEEDPDKFKKRRRKAQIKAERLTVQIESRRPLGRDLTNDRWINTLLTAASTVPQDDSEAMAWQNQLLQQHPAVPYPVAFGTNEDLHWSKDSKGRLCVKFNGLGAYTFKVYCDQRQLKWLERFYQDQEVKRQNKDKHSSALFTLRSGMLAWQEQQGKEEPWQKHRLTLACSLDTRFWSAEGTEVIRQQKAVEVKEILAKMNDKADLTKNQEAFIARRQSTLDRLNNPFPRPHQPLYCGQASLILSVSMTLEKPATVAIVNTITGKAITCRSFKQLLGDEYHLFNRQCKQKQRLAHLRKNAQRKHQIIHATESELGQYIDRLVAKSIIELAMEYQAGSIVLPALTNIREIVESEIKVRAEAKMPGCIEAQKKYAKEYRMSIHRWSHARLKDSIQAQASQHNIPVEIVKQPTLTKPVEIAGEMAKIAYEKRCVP

SEQ ID NO: 2038 - protein, 637 aa, synthetic construct
  REGION 1..637: note = Synthetic
TIQCRLVASEATRQYLWHLMADIYTPFVNEILRQIREDDNFEQWRQSGKIPASVFEDYRKTLKTESRFQGMPGRWYYAGREEVKRIYKSWLALRRRLRNQLAGQNRWLEVLQSDETLMEVSGLDLSALQAEASQLLNILGSKNKTSKNRSKKAKGKPKGKSAKDPTLYQALWELYRETEDIAKKCVIAYLLKHKCQVPDKPEDPKKFRHRRREAEIRAERLNEQLIKTRLPKGRDLTNEQWLQVLEIATRQVPKDEDEAAIWQSRLLTDAAKFPFPVAYETNEDLKWFLNGKGRLCVSFNGLSEHTFEVYCGQRQLYWFNRFLEDQQIKKENQGERSAGLFTLRSGRLVWKPYSSDASRSDPWMANQLTLQCSVDTRLWTAEGTEQVRQEKATSIAKVIAGTKAKGNLNQKQQDFITKREKTLELLHNPFPRPSKPLYQGKPSIIAAVSFGLEKPATLAIVDIVTDKAITYRSIRQLLGQNYKLFTKHRLKQQQCAHQRHQNQVESAENRISEGGLGEHLDSLIAKAILETAAEYGASSIVLPELGNIREIIHAEIQAKAERKIPGLKEKQDEYAAKFRASVHRWSYGRLAQKVTTKASLHGLETESTRQSLQGTPQEKARNLAISAYESRKVAQRA

SEQ ID NO: 2039 - protein, 654 aa, synthetic construct
  REGION 1..654: note = Synthetic
TIQCQLFADEAARKYLWQLMTERNTPLVNELLRLVALHPDFPIWRSKGRLPTAEVTKLAKPLKLDPRFNNQPAKFHISAEKTVLYTFKSWLVIQNRIQRKLWGKVSWLRMLRTNEELVADCGQDLEQVQKKAESLLLASQSPDDSDESNHNLRKNLYQTYDETDDALTRSAIAYLLKNKCQIPSDTEDLEKFLTYRCKIAIQVKSLTQQLENRLPQGRDLTEERFLTTLESATTSVPVDDAEASKWQSQLLEKPDLVPFPITLESNMDLMWFSNQRGKIGLHIGGISEHEFTIGCGQRQLHYFQRFLSDYQTMLASKRQHTSSLFLLRSAKLIWKEREGRGDPWNVHQLQLSCTLDTRLLTAEGTEVVKQEVAAVTTNKLGIMRNKTDRTDKQENYIRRLQSTLNRIDRPFDRPSQPLYQGHPNIIVAVSMGLQSPATAIAIDVTSQKILAYRSTKQLLGDNYQLLNRQRNQQMQQRHLRHNLQKQGRSCQLSNSELGEHLDRLFAKAIVELAQTYRAGSIALPQLDQIRSIVQSEIDAQAQRKIPGHIERQKKYAKQLRISLHNWSYNRLSQAIVNKAGQSEIAIEYGSNSARASPNDRAKGIALSAYAARTARISSYINNFALVQMLEWLKHPKLFGLSLPFTLQFSTSLLK

SEQ ID NO: 2040 - protein, 614 aa, synthetic construct
  REGION 1..614: note = Synthetic
TIRCRLIAPKATRKAIWHLMAERNTPLINEVLHQIPQHPDFATWQRRGNLPDAPAKVLIDTLKQDSRFADQPVWYYISAQKQVTYTFKSWLSLQRRKQWRLEGKRRWLDILQPDTTLADKAKCSLEKLQVTATRILKTVEDPDPFKHLFQEYGRAKKPLRQNALAYLLKRSAKLDPAIEDLEDLEKRYRKAEIAIQRLETQLKASLPKGRDLTGNIQTEALIQSIQAPPLDDESYSVWHQALTREPATFPFPIIYETAETLVWSRDNQGHLLVSFQGQGTGQYTFKIYCDKPHQHWFERFLADQETKKAGGDRHSAGLFTLRSARLSWIPSKKHQNQLEPWNRYHLNLSCTVDTALWTLEGTQQVMTDKAAKTATKLESMHTKAALSKTQQGYVRRLESTIERLQTPYPRPNRPPYQPKANILVGVSMGLDKPATVAVVNALSQEVLSYRSTKQLLGEHYPLLQRAQSERVRISHHGHRQRIKGGKRISTESDLGKHVDRLLAKAIVEIAHAYEAGSIVLPDLAHIREIVEAEVKQRAVVKVPDFVDGQKQYAKAYRTQVHQWSYGRLQDAITSKAGQCGITIEIARQGHSGSPQEKAKDLGFHAYEKRLALST

SEQ ID NO: 2041 - protein, 516 aa, synthetic construct
  REGION 1..516: note = Synthetic
MSFPVVIDGDKYRQVANMVSSYRKLFREFDAMAAMSQAMTSRLVVRKVKVDANGKVIKPSKKPNSAKTAKSDLPPVLTRIKTRKKTAKKVKIEKRLRANLDLGAAKELLEALLGTKPRKAIYYEMRKPFMEAAEEIRKLGVSLGSHMFDSLRRQVHSIRDKREPAYGRIPRRVLVALGVMDLLPAQFIGVPFVTNDPKKKPDGGWTSGKRTGMFMKDDLGRLIIRLQWGHKEDHADFIVDGKTCGGVKTYSKKAADSQKLAFHKMYSGEWSYQTPVLNWRRDGSFSIHVSFRRPAPRDKNLDRDKVGEVIFQSIIGRDLPKKKNDTGRDDDKIFAIHAYRVDRAGRGKKQKCAFKQVFRIPVNDVVDHLRRLNAMSHSREVSRDTRRYWPKHLVKPLQERVHRVTKQRAKIQQQANHTWSRRVVSVLASWGIGTIKVFGPPDGATAGLLGDGAYPWGWHDFVQKLTYKAEERGMRVEVVKSNKVVGRITDQLVARKLSPTMPEPQAAALPKPGVLI

SEQ ID NO: 2042 - protein, 356 aa, synthetic construct
  REGION 1..356: note = Synthetic
MVMRLALKIPVHPAEEDRQRLNNAMTAYRGALRQAAAMLEIASSAGAEIKPSKTGELMIIEDFAKTNAMLSEVFGKTGKALGYPMRAWLVEKMGLRSEWADSALRDLAVRWMAKDPEMTKLRRNFLVLNGKRKPPLFRFQSFPIRARSAELSDHAINFDLGGEFGEITLKIGTLDPGARRVWKLIVDGEYHGGDMKLVKRRNGGWRLVCPYERMEAPDATTKEAVLEVEVTPECVKAGSLELRFDPILPWLDRLALRQKDLEAERDNCQGFRKARAAIVARCNRLTETRDNGVRTWNHVWAKRIVDHARARACGTICLKEPKEEGLSGRPWQWADLKSKIGYKAKLQGLGFTQRPA

SEQ ID NO: 2043 - protein, 390 aa, synthetic construct
  REGION 1..390: note = Synthetic
LREMKRSVKIDVNSSEDQYKVIINLIKTYRIACRQLYSVLAMSEIAVSEHVIDEKGISVKPNKDSNHQLLTWIKNPTRRDIIEELLPGYLSAVWDGVKRDVESRWKSKDPAFPSATRGYLTINGVRDFALFNHIGVQCNSNVPRTMTEHGMSLRFTSNIEDTIDLKFGRLDGSRYYILKNICNNPDWKCGTCYVNEREGKLFVVISYEAPDVKAEIDINRILEVSFTDNPEAFIQIKGPKGVQTYDTISAVEVIAWIKEIQTLTMKFKTHKTATGNPRRAWGSTKQFKALQDRLFRVTKRRENGVKERDHLWSRRIVERAKSWQCGHIVMNELPKDLFGFSWQWYQFSQFLRYKIEEIGGKITEQKATVDHKKLKAKIKLSASLEEIKNV

SEQ ID NO: 2044 - protein, 380 aa, synthetic construct
  REGION 1..380: note = Synthetic
MHRSVKIDIAVKDFLLQRKIIESIRLYRAACRKAFSICAMAEMAGAEIIEDPEKGIVCMPKQNAAKEILEQAFDIHGKKAHLYELRLWLRELHPSWLSIVPEAIHIDVSSRWRAKDVEFPKATRGYLVLNGARSMARFEHIGITIKNTVPTLAGRTVSFKWDEDIGKVELNLAKLDGSRFFIWRMIESKAAGWKLGTLYLNEKDNNLFITMSYTCPDLKKELDKRKNMLVEFSESQENYITAHSPDEAFSGDVINVTGAVAWLKEMECIYGNYKARLRTYGSVNKKWGGKTGYRAVVERMNRYTERRKNGEQYHNHLWTRRITEHCRRKEAGNVIVVNCPSAEMFGLPWGWYQFQQFLKYKIEEIGGVVKFETIEKQKVA

SEQ ID NO: 2045 - protein, 375 aa, synthetic construct
  REGION 1..375: note = Synthetic
EENMIRNLKIECFVRDNDLHAKIRASVRLYRACLRAAFSYCALAETAGAEIVAENGNVTVKPNDEKAREILSACVGHSGKIKYYEMYHWMKELYPSLISNCYSKIQYIIGKMMTMKDQDIKKCQKKFLIVNGKRAFAQFNRSGIPIKSGMAKIDGHLLKCRWDKDIGEVEFTTNKMDSSTYYAFSSLREGWEGWSIKDSYLSFDEDKNKIVVILSYERPDTPTNIEPEKVMHVEFTDDKEMFITCYTDDKWSARPFSAAGIIGYLEEMEQIYSRYWSEFKSYERRERKQRNHVKEKLNRYTERRANAEKNNNHLWSKRIVDFARQQCAGKLVVVNLPEKTLFDLPYGWFDFKTKLDYKMKEIGGTVSFVTVDKDK

SEQ ID NO: 2046 - protein, 387 aa, synthetic construct
  REGION 1..387: note = Synthetic
KENLNRSLKIDLALPNESNHLYRPILNSIRKYRAVARKLFSACAMAEMAGASITTEEKKGESNIKVKPDNEASKLILANAFGTDGKAHLYQLRTYVRKDLAPEWHSFVWDSVRQDVSSRWSSPDPEFSKAKRGWLVTQGVRALARFMHIGIGFPIATANPKMDAHTLSLKWDSTVGPVSFVIPRLDASSYFIWKNIRDKVDGWEPGTVYLNERDGKIFAVLSYKCPFKNEKVDLKKELVVEFPEDRNTFITIHGPKTFSGDVLSSEEAIGWLNELLQISEVYKMRLSAVGNTHKKWGDTVAHDALVKKLNKVTERRTNGQKTRNHLWTRRIVENAIRTGCGTIILKGFPERELFGHPWSWYQFKNFLEYKMNEIGGRVNLELVRKVA

SEQ ID NO: 2047 - protein, 411 aa, synthetic construct
  REGION 1..411: note = Synthetic
TLNRSMTFDLKVDNDKDGIIHRKVVNSIRLYRSVCRKVYSMTAMARIAIADIRITKSGYVKVEDNQKTDLKLLSEAFGANPSRQINLQEFCPTALAFFWASAIGDVTSRWRSRDPEFDCVPRSVLTLNGIRDLAWFNHIGIGMPRLTARPDLYEKSISVKWDHEIGKVDFSFPKKLDSSRYWIWKNLRDNNEEWGLGTIYLNEDEGKLKMTISYSIPEKEKKLNLDKVVLIEFTSDPDNFITCYVDGGNMGEADKISAVEALGWLEKLLLLNNKFKDRASAVGNSRKAWGSKKLKAVANECRERVTKKRENGEKYRNHLWTRRIISFCQRHSAGTIKLINVPDGLLGHPWGWYQFRHDLKYKIEEVGGKIVGTCEDCKNEFELNKISQIVCKPCDAKRKAEKARKRKEEES

SEQ ID NO: 2048 - protein, 633 aa, synthetic construct
  REGION 1..633: note = Synthetic
KDVGTLLIEIKKPVGDVPLVYKRLRALTRSGAQALNMTMQDSHPNAVAQLRAVWDGEAKQTRTSSEDWRARVRTVLARNWNARLERERLDRKAEPDAEMVYAGINGSALAEETATNITSQFNGENMKEMIALRKGFPEFGIASSFYCGGRYCAVVGTLRETLKRTCATKDDADAAVKELGEGHFARRAGDKWQVVHEDSARVALPLWGTGKKVTELIIGPAGGHVRSTWRQLVAHFERRDEIVQAEKELDAIYRTEAEKAALASLKAVKKTERDKTKRREIDGQIRAVVEASNKRMQSLRDPIEAKLYGLTKIGRIGVVWKERRRKWFVTISYTRYTPSIETKGQAAAVNFGINVFLQAFAADESAFHVDGAQILHKRLAYNAARKRIQKSKRQFGRGSRGRGKRRRELPLTKRQGDETNWTQTFIRQLASDLIAWCKRRGVADLYLEDLSGVRDEFEQATGGQAHPEVKRRIHSWPYAETRMAIVREGTQHGVRVHAKGSRFVSQRCPSCTHTVPENVQEVTIPGPVLPLQSLGKGRWREVPYQRFQDSESKAAQYDLYRRQDKTYRFECVACGMKGQADIVACLNHLQDLGVVPAGKPTPPGTPTPLAKMQEAARASVSNDKRKKVRRTGT

SEQ ID NO: 2049 - protein, 538 aa, synthetic construct
  REGION 1..538: note = Synthetic
KRAGTLKLEIIKPDGERWTPRIGPRLRHMRSALPLALNFAFRDVFPSAMAELEATLDGKRDKANAQWRNDVRKRLAFHWARQLERRRDYKPKRGQRFEPVDATVFDPVGDVWCSETSDHIVSRFAGEHFKALLAGRAGVPTFEGGGKAFYAEGRKCEASGTPDEARLTVPLWGSGKKATRLVVAPCGNSARALWHRLVADSERREEIVALERAAKTALPKDGTEQQIAEARAERERAAHALIELGALKMGKVGIKYDERKRKWYALISWSEYCEEGYIEGQAAAVNFGCHVLLQALAEKGEIWERTGTDVLVMRRRFQARRWSLGKAKRSHGSGGRGRGVKRRELPLRKLSERETRWVENWIRVTAADFVKWCLEHRVSDVHLEDLSGVREAFERSTGGEAHEELKRLIHNWPYYQAQQAIERQCAEHGIRCHYKAASWDSQRCPSCRHTAPGNVKTMEVSGATKLIDGDFWRKVEKRSRFECEKCGLKHAGDVITCANHLLDVGKTHALEKMQEAARKRSKIARGSVRKEAKPTAAE

SEQ ID NO: 2050 - protein, 509 aa, synthetic construct
  REGION 1..509: note = Synthetic
VGGTLKCEIVACDWDLVAPRLRALRDTCAQALTLTMRDLYPDAVDALKGAWDGEKFVRAWEASGEKRLREHWNAALARRSVFVAEMKAKAKEKGPEKGPQQEPQEPQEPQKEPQDQQAHAPVTEYFTAETVDQILSRFAGEHLKDLLAGRASFPSWRRGCAFYVRSRACEVLGPVREARLLFPLWGAGRKATELRVAPCGREGEIAWRRLVDGVRDGQGLKMGRVGITHDERRRKWYVLVTWTETIEHKERAGQAAALNLGCNQFVVAVAEDGSVFRVDGTDILAKRRQWNARRASIQRNLATMGSGSKGRGVKRRMAPIARLDDAERRWMESKNRQIAASLRRWCIVHGVARLVREDLSGIRDAFDRKNPDAEKSEAGLVVKRMIHSWPFFEFGQAVDRSLLKADVVVDVRVPDRTSQRCSACGHVSPENVQRVDGRVETRTIEGKTWERRERVTKFCCVKCGVTRDGDENAAQNHLLDALGTSCKEDSIQRSKRGRRRKPETLPSPG

SEQ ID NO: 2051 - protein, 371 aa, synthetic construct
  REGION 1..371: note = Synthetic
AYAIRAITMPVAGPVDLSWEELRPKLRAAWQLATAAANWAVQRLMSLDHLRRPEDEKLQPAPVVYLYPECRALFPALPTQTVCALLQTVERRWRARRWEVLWARSAAAPTYRYPMPFPVKNTNWHLEEYEQSVAVNTALLAQERVRLRLRGGLEFRRKLRFLDAILSGEALQGELSLSEQRVHSGDHRPALLGRAPGGGQKTAARLVAKVVAWFPKEARGELSGTLEVKTDPEHFWVATHADHDPWVLNGDHVRRWQREHNLVIERLAEDSKYEKRWPGKERLEIQEYRERRCGKNRRRLEAWCHDASALLVAYARRLKVAQVVYRDGEKGYMSHFPWCQLAEKLEYKLDAAGIKLQMVKERAAGGEDNVA

SEQ ID NO: 2052 - protein, 392 aa, synthetic construct
  REGION 1..392: note = Synthetic
SLCVRAISLPVAGPVDMEWKELRTLLAAAWSRSRSAANLMERQLASRDVVRTAAMEKLPAAPKLSADVLYQPARALVPQLPSGTVSAIQKHVADTYMKQRYESIWTGDRSFRNFKYPYPIRVRVQDYTLGFVEHDGKEYPSVSLRLESTAVDGAKRITLRLRGGRGFDRFMGDFRRLIDGTAKAGELIITRQRANESDHRPGIGDRSSGGGSRIIYRIMCKIVGRFPRRKKNDQQRTGTLNVRTGSGSFWFVTEEGEERSWLNADHMRRAHAAHALFLGRIADDTKFEKRTPRRNRRQIDGYRATRVDKHKNRIKTFVDQACRSLVGYAARRGYAKLEYDDRDRQYMPSFDYSQIEARLKILCQEAQLELVIVRKDRDDRATATPSADPDGA

SEQ ID NO: 2053 - protein, 370 aa, synthetic construct
  REGION 1..370: note = Synthetic
AYILRAITVPVAGPLDADWRELRDCLQMCWADSTALANWVVTELAKRDVIRAGEARMPKFEFVYLYPDARKRFPHLNCQSVVSILQAVDRRYRRRRLEAIWRSSESLPRYRYPMPYPTHNQGWKVIKRGNDYTLRVRMQGEPWDLRLRGGNGFGRQQRQMDQILDGSAVQGELAIYRVRAHAGDHRNGAAGKASGEKAFYRIMTKMVAWLPREERRKGKGIVLSLRTASDRFWIASSPAIEDIWHLNADQARTWIIGYERFRQRLSEDRRPETPRHRANRDLELRGKKHRDRIRSFVQMSVAGLAGYARRRGVGTIIYHDTDRSYFPSFPWAAVVTALQTKLDEYGIAFEHASAEVASESPDPLAKEEHE

SEQ ID NO: 2054 - protein, 376 aa, synthetic construct
  REGION 1..376: note = Synthetic
RYLLRAVTIPVVGPVDGTWDELREDLREAWVDATALSNWLMTEYYVRDVRRNDQAKLPPQPKTYLYPEATARFPSIPASVVTAIDHAISGKYRAARYKLIWTGEVSLPTYRYPAPVVIPSRAWRPEYGKNNVPIVHVTLRRSTRRWTLRLRGGREYRRQLAAFSQMVAGVAVAGELALYRQRANAADHRNGVADRDSGGQKASYRVMCKMVAWLPREPASKSDGVLFVRTDKDALLVALNAKDEKVWVLNADHVKRWQAEHRRKLNRWSDDQKAENRPPNFQARREATSTKHRRRMDSACHEAAAQLVNYAARRRFAVIRYDDAIRDFLGQFSWDRLRGLIREKADAKGIVFELVDARGSVAKDTLAPPAATQDKL

SEQ ID NO: 2055 - protein, 357 aa, synthetic construct
  REGION 1..357: note = Synthetic
RYVLRAISIPIASPLDGSWEDLRKALRLMWAETTRCANRIMTECYAQDVRRTGNERAKDKMPSMPRIYLYPELRKEFPGLPSQTVASLEHAAVAKYRAIRYKVIWLASAALPTYRYPTPFPIPAQGWHAYLTEDKPIVSLRIGERRLELRLKSGSQFRRQSAAFRLIARGEAVAGEAAIYQGGTGLGAPVLVKLVAWLPRQAAQEATGTLYVRTVADSLLVAVNAKDEVLWRYHGDHLRRWAAEHRSALERWADDSKYENRPVPKFAERRADAARKFRDRMDSATHEIAAQLAAYAARRRFAVVEYDHTERAYCEAFPYFRLASLIAEKLDARGTQFVLKPASGGAPPESQEPLANT

SEQ ID NO: 2056 - protein, 391 aa, synthetic construct
  REGION 1..391: note = Synthetic
KYVIRAVTIPVSGPIDPEEWPEFREALRTAWAHATNISNWAQTTLYASDVRRKSEDKKLAPMPKIYLYGLAKSEYHAWDDGTIDKASAGDILTQVEQKYRSQRYEILWLASRTLSNYRYPQPFPFRPEGIKIDKIDSRICVEIRVAGRRWKVRLAGSEKNRRQLAGIQHLMDNPELMAQGAIYQVTAHGSDNRNGDRGKDNGTGIKWKTRIMLKFVGWFPVKHKERDGDLFVNTDVDSLLVAMNTRKDKLWFYNGDHARRLCLKHQDHMRRLQRRADDKKHERRKPRKKNARYRQNVSDISRKDRNRMTSICHEVSASVVGFAARSSLSRIVYNDSERSFSAYFPWAKLREMIKQKAALHGITFEVAGKEGDGDGDKSKKAKKTKKEPALT

SEQ ID NO: 2057 - protein, 463 aa, synthetic construct
  REGION 1..463: note = Synthetic
TIRLRISRVINAGKNDFYKSLRQTLNLSRRIANMVLTHCATDDPAMSNPVSEKIAKAGKLYAYPHIKALNRGGYAIELSSLARRYEKVYKDARFAIWRGTKQLPLVRSAPWPLLHNKSTRRFSLRETDDGRLVMTLSLRSDKFEVELKRGSNYRDQVSGVIDAMKRDAIGDSSIWIDRNGRASIGFSVDVEPEKPRVARGTLRASTSRDAFLVAMKERDTTPWTINADQMRRWQREKEKRYQRLRQDRKADVKLGRPANQELQQVAGKYNRRMQTFAHNAARALVDYAIRRRVAKLTLDATVKSYVKKFPWHDFATKVAYKCEMAGIEFSEITQTVLDPSTDKPHVYFKYSPMTNRVKIGRTGVGAARHKQAETDSPDDQLTILALDNQPRNKLVAREKYWHAYFSSAKSDKIKQREWYEAEPIITWLREAEWLGNSGNRSQIAQVLGTSEDGVLSGPPPGPR

SEQ ID NO: 2058 - protein, 363 aa, synthetic construct
  REGION 1..363: note = Synthetic
AKSLHITRKVQLLVNSADKDFVYESIGKLMKWQNICFKCANLIYTRHFLQEQIAEMVYLAEGTRLKFTDHNKDSDGMLVSSRTNSTYKILTNKFKGQIPSNIFNNLNSQLVASFIKERSLYYEGERSIKNFKRTITLPFSAECIRQLSENIETGNFTFTLFGIPFKTYLGNGFDEKRDLFKQVTTSRLKMATSFLKIEQKKIYLLATFVQEQQTYLLNEEVIAEASLSLEIPLLVKVGRISFSIGTKEEFLYRRLAIQTARSRVQASVNANRSGHGRKRKRKPLEHYLHLERDYIDHKLHVYSRRLIDFCLKHRAATLILTDQQEKEATAKAEPFILRNWSYGQLKDKIAFKAAKVGINLIVE

SEQ ID NO: 2059 - protein, 358 aa, synthetic construct
  REGION 1..358: note = Synthetic
MYTQKIQIFIDRNNEAEVKAYQEKLYSWQKIAFKGANYIYTHLFLQEQIKEVLYINEGTRAKLCSINVDEDGILTSSQMNSTYRLLSDRFMGEIPTDILNTLNGRLHVTYQQERKLYYTGERSLTNFKRDINLPFSTVSIKRFDMAEDGKNFRFNLFGVPFITWIGKGYDKRDFLRDVFRGKTKISGCFLKLDKTRIYLYASYKPEAAAHPLDEAVIAEASLSPQQPITVKIGNQSFAIGNKEEFFYRRLAIQGAYKRAQQSVNYNRSENGMRRQHKNLERFKGLEHRYCEQQTHKYSKRLIDICVRNGAGTLLLVGQENKEATAKEDALLIRNWGYQSLKDKIAYKAAAAGIILIVE

SEQ ID NO: 2060 - protein, 361 aa, synthetic construct
  REGION 1..361: note = Synthetic
KRVVLTRKIQLLVNSEDAQIRREVYKTLCQWQHICFKAANYICTHSFLQERIKDMIYLAEGVKVKLSHIEKDADGILATSKKNTTYQVLSANYKGQLPTRILSCLNNQITALFQKEKADYFDGTRSMRNYKKDLPIPFSNADIRHLEVMDNGDYSFSFFSLPLRTYLGSDTTDKKQLLYQLSQNHLTVRNSSIQLLNGKIFMLLTIEQPQEQHQLETGIIATASLATDAPITVSISADQYAIGSKEEFLYRKQAISTAITRMKKGASFNRSGHGIKRILKNVTHLQKAEQRYIQQKLHVYSGRLIQICIKHKAGILVLGKEPDNSTNELLLRNWGYGSLKDKIAYKAHKAGIQLIIATTNE

SEQ ID NO: 2061 - protein, 361 aa, synthetic construct
  REGION 1..361: note = Synthetic
KLFTTRKIRLLIDSDDIDQKNKILDTLYQWRYICFKAANQIYTHHYVQQQLREMLYLTEGVRARLSDIKKDEYGILTTSRMNTSYQVLAQNYKGSIPMHIMSALNGNLVASFNKMNKALASGESTLPSFRREMPIPFKGTDVKKLRSSREGAVFHFSLFDIPFRTYLGKTGHDKREILKRLAAGQVKLCSSSLALDKGKIFMHAVFQTEAGEHELDQDVIAEASLSLDYPIMVLIAGKRYTIGSKDEYLYKRLAIQAAIRRKRKATAFMNQNSRRQLRKSTIDNLMQSEKRYVSHKQHVYSKRLIEICLKNKAATLLLVDQTEKEQQAKEDPFLFRNWGYYGLKQKIERKAEKAGIAVLVE

SEQ ID NO: 2062 - protein, 362 aa, synthetic construct
  REGION 1..362: note = Synthetic
PKKIILTRKIQVHIDCDDAEKRKAYYQQLWDWQWMAAKAANLIFTNLYVQDRVKDLIYFTDDVKVKIADKKKDEEGILNSSRMNTTYRILSSNFLGKMPSNIFSNLNNTLNSLYNSEREAYWKGEKSLRNYKRNIPLPFGADKLKLANGDKGHDYMFSLFNIPFKTYLGKDRSDKKVLLQRTLAGTLKLRTSSLKIDQGKLYLLATFEMEQEEHHLNDAIIAEASLSLEHPIVVKVGKEHFQIGNKEEFLHRRLAIQAARHRLQRGSTFNKGGKGRKRKLKSLDDYTAKEISYVNSRLHLYSRRLIDTCIKTQAGTLLLVNQAKKEEVAKEEEFLLRNWSYYGLKEKIAYKAKKAGIHVIEE

SEQ ID NO: 2063 - protein, 362 aa, synthetic construct
  REGION 1..362: note = Synthetic
TETVILTRKIQLLLDCDDQEQRSLYYQRLFAWSDMVYKGANLVLSHQYLLDHLKMVPYLNERVKIKIADAAKDADGVLCTSKMNATYRVLTSYYKGELPSAVISPLSQALFKLYRSESLAYSRGERSLRSYKRGMPIPILGSQLKLAPHEKAREFKVGLLQIPFRTFLGKDKTDKRLLLQRTMLGRVKVCSCALKIVEGKLFLLLAVEMPKKANPLQPHVIAEASLGMEHPIGVNVGKQYLHIGHKEEFLHRRLAIQAAMQRVQKAMAYNVGGRGKKRKLNSMERFKDKEKAYVDSKLHLYSRKLIDFCVKHRAGTLLLVNQQAKEEVAKEDAFLLRNWSYYGLIEKIKYKAKMAGINLIVE

SEQ ID NO: 2064 - protein, 369 aa, synthetic construct
  REGION 1..369: note = Synthetic
KSTMVLTKRIQLLVDCDDKEQKHAYYQQLYAWQRICYQAANIACSHLFVQDRISEFFYLTDQVQHKLADQSKDGGGILNTSRMNTVYSVLSQKFKGDIPMHIISTLNMSLTKYYNYERKEYFLGEKSLRNYKKDIPMPFQPVDIRKFRKCEDRQEFQFNWFQIPFRTYLGREKGDKRLCLETFLVNKAILKTSSLQIKDGKIYLLAAFEHQLPPLNLDGAVIAEAELSFEVPIILTVDQRSIEVGSKEDFYYKRMAIQAAIRRKQKAASFNRPQHGRQRLLKSIDQFKEKEKSFVDRTLHLYSARLIEACRKYKVGTLILRRIVESAEQDEAAKEGLHQKLILRNWSYYSLTDKIRYKALKSGIELIVE

SEQ ID NO: 2065 - protein, 362 aa, synthetic construct
  REGION 1..362: note = Synthetic
KSKITLTRKIQLLIDVPSANKSQMWEKLYRYQNRCFRAANLIVSHLYVQEMIKDFFYLTEEIQYKLADEKKDEMGMFDRSKTNTTARLVFDRFKGEIPTDILGCLNNTIQSTFSKNKADYWQGSKSLMNFKKDIPIPLPVKCISKMKYDPNKKAFTFNMFAIPVKTYLGKDFSDKHLVLERLLREEIKLCNSQIQLKDGKIFWLAVFEFEKENNGLKPEIIAEASLSLEHPIVVKANNVRMNIGSKEEFLYRRLAIQASNKRIRAGACFSRAGHGTKRKNKALQKTENLENRFVSHHLHLYSRKLIDFCIRQQAGTLILKDQEDKIGIAKEQQFVLRNWSYYELQTKIKYKAEKAGIELIIG

SEQ ID NO: 2066 - protein, 363 aa, synthetic construct
  REGION 1..363: note = Synthetic
NKTLSLTRKIQLKVDLPTYEERKEAIGKLYQWQNRCFKAANIIVTHLYCQEMIKEFFYLTEDIQYKLADQKKEEDGILNRSRINTTYRVIADRFKGEIPMEILSNLNRNLESSFNKNKPKYWKGERSLKNFRRDIGFPFPARCMWGFKHDPERNAFCFRLFQIPFCTYLGRDFSDKRDLLHRAVKGEVRLRTSEIKLTDTKIFWLAVFDIEQEQHALKPEVIAEASLSLEHPISVKVGSKRLNIGTKEEFLYRRLAIQAARKRALAGTVNSRGGHGRTRKLKAVEKYKNKETKYVNQRLHVYSRRLIDFCVKHQAGTLILINQEAKIEAAKENQFVLRNWNYYELIKKIEYKAKKAGIELVID

SEQ ID NO: 2067 - protein, 364 aa, synthetic construct
  REGION 1..364: note = Synthetic
KTKIVLTRKIQLLLNIKDQEAQNKAFELLCQWQRTCRRAANLILSELYMQDRLKDMIYLTEDIKIKLTNVAKDPSGILRTSKKNSTYQMLSQKFKGEMPMSILSALNNNLCGTYQKERMGYNLGTRSLRNYKREIPMPIAAKDFRHFAKIPKGRNYTFDIFGIPFKTYLGREKNFDKSALMDGLLDNKVKLCTSSMKMQAGKIFWMATFSYEKKLTVTDSDEVAEATLTIDTPIVVTIGKYRYEIGNKEEFMYRRIAIQNSLSRTQKGTSSSRGGRGRKRKMKATHKFQALESNYINSRIHFYSRKLIDLCVKHQAASLVLVNVEEAQEGTKQDECLLHNWSWYNLKDKITYKGNLKGITVTAR

SEQ ID NO: 2068 - protein, 363 aa, synthetic construct
  REGION 1..363: note = Synthetic
EKKINLTRKIQLVVDSKDGDFIGEVYTKLRSWQNITFRAANFIVSHYYVQSQLKDFFYLTEDIRYKLGDQNKDENGAFITSRMNTFNRLLSQKYKGQIPIQSFASLINNLFPILNKQSAEYWSGERSVSNFKRDAPIYVPSRDIRHIKATEDGRNFRFDIFSIPFRTYFGRDFHDKRQLFEDACKGKIKLCASTIKIESKKIFLLTSFQVEQQKTAVDKNIIAEASLSLEYPVVVTIGKYKYQIGNKEEFLYRRLAIQAARLRNLKSAKYNHGGKGREKKLKNVIRLDGKEKSYVDYKLHLYSRRLIDLCIKHGAGTLLLTEQQEKEEVAKEDVFLLRNWSYYGLKQKIEYKAERLGIMIINE

SEQ ID NO: 2069 - protein, 363 aa, synthetic construct
  REGION 1..363: note = Synthetic
SEKITVTRKIQLIIDTKDKEEIIKAWKTLYGWRYICYRAANLIATHTHLQYQLKDLFYLHEGAKVKLTNYSKDGEGILNTSFLNTTYQVLSKNFKGEIPTAILGSLNNSVRALIGKEQLAIARGERSVRNYRAKIPIPIPVKSIVDLHFIPEGKYYTFSIHGINFKTYFGRNNNSTRTMWNRYLTGEYKLCTSNLIIDSKKIFLLTVFQFDQESVLLDAEKVAEVSLSIEIPMILKVGNYRYEIGSKEEYLHRRIAIQNALRRCQKGATSSRSQHGRKRKTKAIDKYKEKEKNYINYRVHNYSRRLIDLCVKHNVATIILINQDEKEEVAKGDNFLLRNWGYFSLREKIEYKARMVGIKIVIE

SEQ ID NO: 2070 - protein, 363 aa, synthetic construct
  REGION 1..363: note = Synthetic
TRKIIVTRRIQLLINSDDDQVRHTTWETLWQWQHFCFRAANQISTHHFIQDQIKELFYLKDETKVKLKDVHKDPDGILTTSKTNTTYQFLSKRYKQEMPMAILGCLNNTLVSTYNKEKEAYWKGDRSLRNYKRNIPIPIPAKALLNISSIEKSRNYTFSIYGLPFRTYFGKELDDKYSMWKRAMEGDYKLCDSSLQLDGSKIYLLAVFQFDKLVGNLKPEVIAEASLSMEIPVVVKINRYQYRIGTKEDFLYRRLAIQEAIRRCQKSSGFNRTKNGKARMRQKVNTFRDAEKRYINYKLHVYSKRLIDLCIKHQAATLLLVDQQETEELAKEEKFVVRNWNYGGLRQKITYKANKAGINIIVE

SEQ ID NO: 2071 - protein, 486 aa, synthetic construct
  REGION 1..486: note = Synthetic
SKVNIVTRRIEIRFGGEGKEGRAAFYQTLYRWRNICVQGANHVSSQMYFMLMKDQFVYLTESAKSRLSKPNFEVDTQEAYISATDKAEIQEALKNLQKEDLLTSHRNAFYRVLSYMYKGSIPTAILTVLSQKLYKDFNNERTEYLKFRRSLRSYRETMPIPVSVRDIRKIRRVEEKHNGTKYVNYAFTLYDLPIVTRFGWDRSGNRVFWERAFGVSFLPGWFREAEARLSAEMVSLAGATGELTVGNRTFQLAAVADSDGSYYYSVTCTDEDRKYSCKAIEEKEEGDVAPVWRFANDYKLCNSSILIERSRVKEKGDGSKETTKIFLLAAFEIPAERRLVRSEVVALCSLSVDVPIKVQIGEYSTDIGNKEEFLYRRQSLQEALRRLQRAARYNKGGKGRERKLQALEKVGNEERRYIGYKTHQYSEMLVDLALRFGVATIVLQDQSVKEEMAKENEFLLRNWSYAELKTKIDYKARRFGITVHEE

SEQ ID NO: 2072 - protein, 390 aa, synthetic construct
  REGION 1..390: note = Synthetic
KQNIITRKIELNFDVLDNAELPGLYERWFLLQNRVREAANLIVSHQFIQGNANKLLNYMDDKDVNRLVDSKNDDAGILTCSPMNTTYRIISKEFLTDVPSSILASLNSKIVQTFKKEQFNVSIGKQSLRSYRNVIPIPFMSKSINGIEKCDDGNYKFDLFNTPFKTYFGRGKTDELIMDRAISGDYKLCDSEIIIRKVRVKTKNNTTVKRWRLFLLLVVSMEKEPFIPKEGKKAICELSIQSPIIIKNGKGKDKDFIIGNNEEFLHGRIAINGARKRLQRQLKYGTGGKGRKKKLQAIERFEKKEKNYVDNRMHKYSRELVDYCLKNKIGEIVLSNYETVKDECADDVVLLPNWSYYNLAGKIVYKAAMHGIVVTLDKDKKDKKEEELVH

SEQ ID NO: 2073 - protein, 372 aa, synthetic construct
  REGION 1..372: note = Synthetic
EVTITRKVQINFDVPKTELQDSFKKVFEWQRIVHKAANWIMTHQYLMENVKDMFYLTDEIKHKLANIEKDEDGILTTSKDNTTYQVLSKAFKGQCPMGMLSGLNTVICKKYKSEVVDIKKGVRSLPTYRGNIPMPVRSADISSWQKNEEDGNYSFYVYGTPFKTYFGIDKSGNSDIFDMALLHEKYKFCDSSIQLEKVGGKWKMFLLAVFSFDRQIIKVDKNKVASCHLSLQYPIIIKEKKDKFYNIGSAEEYLHRRLAIKGALTRLQKGCKYNNGGNGRTKKMQAIERFEEVEKNYINSRMHLYSSMLIDYCVKRGIGKIVLENYKETVDKTHEETEEGKFLLASWSYYSLSEKIKYKANKLGIEVEIPKA

SEQ ID NO: 2074 - protein, 362 aa, synthetic construct
  REGION 1..362: note = Synthetic
NHSVIIARKIQILLQADNKTQWKERYKMIRDWQTIVAKAANWIATHHYIQENLKDLFYLTDKAMVKLKDVKKDEEGILNTSRMSTTYRLLSGKFKGQIPMAILSSLNSRIISTFDKEKKEYGQGLRSLRTYKQDLPIPIVASDILHIEPAGKGEYLFSLYSLPFRTNFGRDASGNRLFFERALKGEYKLCDSSIEIKGNKLFLLAVFSFQRTEVSLSVDIRVEAHLSADIPIVAGTSETQIRIGSREEFLHRRLAIQDSLHRTQMAMRFNRGGKGRRKKMQALDRFHLAEKNYVNSRLHQYSARLIAFCLQHEAGVLVLKSQTEKEAQAKENEFLLRNWSYYGLKEKISYKAAKYGIAVIVE

SEQ ID NO: 2075 - protein, 412 aa, synthetic construct
  REGION 1..412: note = Synthetic
IKSIIITRKIQIRVNESDPKIRNEFYQRLRAINEVVMRMANTAATHLYVQKNLDEFEYINNDYLKHSIEIFKEGKGMSPNNRTYRVLSEKYGEDLKGLSDITTNLNSVLVQTFKKEGKEYFTGKRSLRTYRKDIPVPFSASSIINIKQTEDKKNYCFNLFKIPFATVFGRDSSSNREMFERSSLNNGDYKFCTSSFQFKKNKLYLLAVFQFEPDLQPLDYNNIAEAFLSPEFPVIFRHKLFEYTIGNKEEYEYRRKAIQASLNRHRIAAKYNAGGRGRKKKLSNCERFEEKEKNYIQTKQHTYAKMLIDHCLKEKCGTLILRYTQEINPPEGLTKEEFEKFNELNIPLFRNWGYLGLTAKIKHKCDKVGIKLIIENGKQEESKEQKLPKKQPVRQNVPNKSRIARRTAQEVS

SEQ ID NO: 2076 - protein, 384 aa, synthetic construct
  REGION 1..384: note = Synthetic
NTITRKIQLLINDQDHVKEVFETLFKWQEIVFRSYNYTATHLYIQENLKEFFYMNEEFRISLTKKSELNEGILNTSKQNTTYQLLSSKFKGDIPMDIIACVNQRIVATFNKERLNYFSGKSSLRTYKRTVPIPFSKTSMLDFKESIDNNKNVNYTFSLFGLHFKTFFGKDSSNNREIFEKALAGDYKFGGSSIIIEGKKIFLLATIQFESIKQNTHDSNKIAYAYLSFNNPIVVKIGKKIFEIGTKDGYLHRRIAIRAGKRRLQKNLTDTKGGKGRIHKFKALEQFESKEKDYINTVLHTYSKNLMELCRKNNIGKLILENQSEEIKSIESRIKEIKNNLTLTNIEKRNLIENSKFVISNWSYYGLLEKIIYKSKIYGIEVIKE

SEQ ID NO: 2077 - protein, 386 aa, synthetic construct
  REGION 1..386: note = Synthetic
GNNMVITRKIEVFVCEDDKDLRRAYYDKLYANRDIAVKVANMAMSHLFALDNTMPYLSAEDKELIEFLGVRGNKATKQNAPYVAASEAFKGKADMGTISCVLQNAQKMYADDRKRGMWDRSLRSYKQNMPVPFKAGRFLNLRFAEYTNGEGEKREGCFFTLMGVPFQMRFGRDRSGNRLIVERVISGEYKMCTSSLKFDGKKVFLLLCMDIPKKEVKLDEKKTMYAYLGVMNPIICTCDVRAAKEYDSGYKWWEIGTKEEFNYRRRQIQEAVHRCQINNRYSEGGKGRKRKCQAIKRWHEKEKNYVDTKLHTYSRMLVDLAVNHGCGKIVLLNQTTREDKAKEDNQNGEPFVLRNWSYYGLKDKISYKCKMVGIKMIVDKDKENEE

SEQ ID NO: 2078 - protein, 385 aa, synthetic construct
  REGION 1..385: note = Synthetic
MVITRKIELRIDESDKDLRNAYYKKLRDHRNIAVKVANMTASHLFALDNTMPYLSEEDREHVTFLGVKGDAATRQNAPYVAASQAFKGQADMSMVTCVIQNVRKMYQSDCEGGGMWQRSLRSYKADLPVPFKKGQFLRLRFEQRINGEGKPFECCCFTLIGIPFAMRFGRDRSNNRVIVQRIVNGEYKMCTSSLQEKDNKWFLLLCVDIPDEKQKLIKGKKLYAYLGIDIPIVCATEVSANREYDSGIRFFQIGSKEEFLHRRIQIQEARRRCQIANRYTVGGHGRRHKTQALDRFSEREANYVTTKQHTYSRLLVNEAVRHNCDTIVLMQQQQREELAREGHNKVETAQDAENRFLLVNWSYYGLKDKITYKAKRYGIAITEEA

SEQ ID NO: 2079 - protein, 396 aa, synthetic construct
  REGION 1..396: note = Synthetic
MIQTLKIEIFISESEKDLKNEYYKKLYDYRYAARKAANITAAHLFMLDSSIPYLNEDDKNNLSFLGAKGKEASKGNAPYVVLSNEFKGKVDMRMISSVIQSVKGNYSKEFKEVMIGNRSLRSYKNNIPIPFQPEGMINFSEKEYLNGNGEKRSGIFFNIYGIPFQMKFGKDRSGNRNVVRRILSGELKMKTSSIQIVKKEGCEQKIFLLLCVDMPQKSNKLIEDKKMFVQLGVMQPATVELATGIFNCTLENNNGIITVFEIGSAQEFNYKRRQISEGLKRLQIDCTYNKGGNGRKRKLAPLERYKEKEINYVEQKAHLYSRKIVDLSIKNQCSEIVLINQDKREEKAKKASKKKNSECDNNELTQKFIFRNWSWHGLIDKITYKAKQNGISVIKL

SEQ ID NO: 2080 - protein, 434 aa, synthetic construct
  REGION 1..434: note = Synthetic
MVITRKIEIYVHESDPDMKRNYMQTIYGWRDAIRRAANLVVSHKFVQQNVRDFMYLQEDVLDRLLQQEPERLVKSKRTGREVVRYNVSDTLRKEKGMSEQNTTYRLLSSILKGKVPSDMYTCLNQEICKIMRETLSDINRGEATLRSYRNNIPMPFSGRSLSRLRGVAECVVSKDTGIARNVTRYYFTLFGIPFACRLGRDRSNNAVILERCISKEYKLCSSSISFEKTVSRETGKKQQKLFLHLCFDQPASRNEVDEKKVLYAYLGFDHPILCSYDVQARNGYDSGIKWTEIGTAEDFLYRRVQIQQALKRCQTSCKYARGGRGRQRKMQAVERYAQKERNYVDTKVHTYASELVKTAVRYGCGTICLVSQTEREESAKHDNAKGDSFVLRNWSYFNLKNKIQYKAGLAGVRMTVQGTEDEEAEEPPAEGDER

SEQ ID NO: 2081 - protein, 430 aa, synthetic construct
  REGION 1..430: note = Synthetic
MIITRKIEIRIHEEDKEMKKNFMHTIFEWRDAIRKAANLIVSHKFIQENVRDFMYLQDDVIERLLIEDPSRKTVNSKTGKETIKYNISDTLKKEKGMSEQNTTYRLIAGLLKGKVHADMYSCLNQAIAKTCSKEIMSDVYKGESTLRNYKNNIPMPFSASALNNLHKVEEMYIVQQDGKEKKVNRYHFTLFGIPFVCWLGRDRSNNEAIIQRCISGEYKIKSSSIAFEKVVNRETGKKKQKLFLYLCVDMHKQEIKLNEKKMMFCYLGLTHPIEYNYEVQAKNIYDSGVKWSHIGDAEEFLYRRTQIQAAMHRCQIACKYNKGGNGRNRKLQALDRYAELEKNYVHTKLHTYSRMLVNEAIKYRCATIVLVNQESRELQAKEDNQKGEPFVLRNWSYYGLKTMIEYKAKMAGIKMVEVGKEISNEELNTE

SEQ ID NO: 2082 - protein, 371 aa, synthetic construct
  REGION 1..371: note = Synthetic
MTLTRRLEIYICEDDKEVKKELYSQLYNWRYLIVNGANEMLSYLYSIDRLKYYKFITEQSKIDLGIIGARGEPVKEGSAGYVLLSERMKGKVPTDILNCLQKTVTKKYTCFKPALFKGTCSLFTYKNNTPIPFSSISIKNLRWNQDLNHFEYTLFGISFGITLGRDRSNNKKVLEYCINNTYELCESSILIDDTKRKLFLLLCYKCGSKTVLLNDAKSVDASLSAETPIIATFEGDVKLIGNREEFMHRRLQIQSAMRRAQINSKFSAGGKGRKRKFMAVSNFHNKERDYIKTRLHTYSKILVDFAVANRCKRINLINQTDKEKRAKCDPFLLRNWSYYGLKKFIEYKAKLWGIEVRILELPKNNLESNIN

SEQ ID NO: 2083 - protein, 370 aa, synthetic construct
  REGION 1..370: note = Synthetic
TKQTVITRRIEVFVNEDDSNQRNAYYQTLRKWQEACRAGANLIASSLYALDQQQALSRILQPDILTKLADRAKDPDGILSTSYQNTAYRLLSAKYKGDVPADILACLAQDVRANYVADKPKLLSGKISLRSYGDSNPFPASATEWLRKIEWVEEKRNYRLRLHNVPLQTNFGRDHSGNRLIIDRAVSGEYTLCQSKLQFKGRKMYWLATVRIPIQSRNLRDDRTVYAELSIDAPLKARFGEEVIDIGDKQAFLHKRLSIRQAIQRLKPALRDAAGGRGRAKKLKAQTRFKDVEKNYVNTQLHTYTIRLINWCIKQNAAKLVLVKSTTKQDKVNEESETDREFVLRSWTYHGLTEKIKYKAAREGITVLIE

SEQ ID NO: 2084 - protein, 378 aa, synthetic construct
  REGION 1..378: note = Synthetic
TIITRKIKLLIDEKDKKKSYEHWKEMFRIADVCRISANYVSSHMLLQDFMKDLIYLNEDVKVKLADISKDELGILNTSSLNSTYRLLSKKFKGTIPAATFNSINTSIRKTYDKEKKEVLNGEKSLRTYRQNIPIPITSKHLKSGCKRITLEYEKEGEIKTVETFGFSFFSVPLSMYFGRDRSGNRLIVERSFFGDEYKLCNSSIQIKKNRQTRKHELFLLLTVDIPQKSNSFIEGKEVVAKLSPDFPMVCSINDRSFKIGTKDEYTYRRLRIQAKLRKLQMELKFSKGGKGRAAKLKAIDRYHDLEKNYINTKLHQYSRELVNICVKNRCAKLVLLNINKEIEEAKENDFLLRNWSYFGLIEKIKYKANIEGIEVSLS

SEQ ID NO: 2085 - protein, 362 aa, synthetic construct
  REGION 1..362: note = Synthetic
MIITRKIQIYPIGTPEEKKVHWSTIFGWQDMTYRLANQIATHRYIQDGLIQMLYLEDGIKRKLADHKKDEFGILNTSNQNSTYEISKAFDKLPADIRTSVNQYVSNYYNKEKSEYFTGKRSLRNYKRTLPIPFPAKSMRRLQWNEEINNFEFVLFGISFRTLLGYDRSNNRIMIERCLSGEVRMCGNSIQIEEKKTFLLLKIDIPSQKVKLNPNNVTYAILGIDNPIIAANNEDNLYDDKKYLIGSKDEFFYQKKQIQEALRRAMQVARYNKGGKGRKRKMQSIDRFEKKEANYVNTKLHTYSKILVNYAKNNKSQKLVLIEQSKNEISEGELAILRNWSYFGLIEKIQYKAAYWGIEIEKK

SEQ ID NO: 2086 - protein, 441 aa, synthetic construct
  REGION 1..441: note = Synthetic
KTTTITTKKIQLFPVGDKEERDRVYQYLRDGIYNQYCILNTYMSQVGCLYYKYDKNFNDPNFKEEMKMIFRNTNTAIYDMKQAKGLGMAGNCGMKVKQDFSTALKNGLAKGERNLPFYKRDFPLMVPSRFITIYTGDDTYITDDGTEKTVNAYFFKFVNGIHFKLYLGAGKNKGPDKFLPSLLESIVTDPEHYKVCGSTIQITNKGKIILNLSVKIEKDAEEYIPEHGKIMGLALGYDKCLVAALSTDDTEYEIGGSIKNDLVAKRKDIQIHFENLQRALKYSNGGHGRGKKLAKLETHKSYEKNYVQTYNHNLSKMVVEFAKDNKVSAIVIEDVTKSDLDDYPVLLRNWSYYQLVQFITYKAEREGIVVTTSKMTDKQDKKTDVLRTVRNVCSSCGEVFCTEEVIPKVFEWTQEVSFTCPHCGKTISHAYNKAKNMTVMG

SEQ ID NO: 2087 - protein, 455 aa, synthetic construct
  REGION 1..455: note = Synthetic
ANRMIITKKLKVIPDGDKEEVKRVYKYIRDAQYNQYRYMNRLMSNVCMIYYKYDMDITNPNLKEEMKELYRVSNAAWIKEDNPIGSGMQATATSRVKQDFSTALKNGLAKGERRLPQYKRDFPFLMNGTAIKPFIKNVTYTDTNSGEDKIRTEYHLKWVNKISFRIWLPTNAYKDLNIQTIIAALNAVIENKEGYKICGSSIRVEDKDIFIFLTLDVPSKKTSYTPVTGRTMGVALGYDSPLVCCITENDKDSKFFAVGENLDFVENRKKRHEKYRQIQSAAKECHGGNGRKRKMERLNAAKNNESNYRKDINHKLSKEVIDLATKNKVANIIIESTTADELKTVPDMLRNWSYYDLVAKITYKGNMYGILTEEMKKTEKKSTKKIKRADCCPACGEVFASGNANALTPDDYWNTSTEFVCPSCGTVEEYGKVRAFSSACKAMLPEEKVKNNKTE

SEQ ID NO: 2088 - protein, 430 aa, synthetic construct
  REGION 1..430: note = Synthetic
KNTFVTRYRILPVGDKEERDRVYQYYRDAQYNQYLALNQAMSETGALYYNCRRDIKSAEFKEKYKELFKRDSSVFDNIIFPKGGHLQGNVTRKVQSDFSTALKNGLAKGERQLPRYRRDFPYMIHGVELKPYAAEEEYEGKSRTSYFIKTVNKMHLKIVFGSAVRKAYNKVDLIKKLAENDPDYKICQSSLFFKDSKMFLNLVVTKNVDENDYEYVEGRTMGVSYGFASPAIVAFNDSSNTYSLGDGEMFINKRIQMQEHYQRLQKSLRSAGGQHGRKKKLRSLERLKAAERNFANLYNHKLSKQIVDLARDHKVERIVLQQIDTKQVKTHPVMIRNWSYSQLYDKVKYKAEFLNMKAETEIPEDICPHCGCFIKLQEFVSEGMDEQPQSEYCEICPECGEKIDVSRNRAKRLAMSEGKKKTSRKRKKEE

SEQ ID NO: 2089 - protein, 401 aa, synthetic construct
  REGION 1..401: note = Synthetic
MYLVRKIRLIVIGENKEDVNEKYKFIRDAQYAQYRGLNYMMGQVGALYYSCDRNISSDEFKTQYMEIFRASNQVVDGIEWGTGIDTRSLVGTRIKQDFSTALKRGLAKGEISLPNYKRSYPLLTKGRDIRFYTDYTEGELVHDMVLEPDFNLYIKWVHKIHFKVVLGNPYRSRFLREELWKVLCGEYKIAGSSLGFDKNGKLILNLSMDIPVNKEKKENMNNVLGVRLAYAKPVVAVVNSTGRCFMIGDGERLIGYRKKMRNNIRRVQQDVTLAAGGSGRAKKLAALNRFKDREANFAKTYNHQISRRIVEIAKNNGCSTIVLEDIGNIYDVDNIVLSNWGYYQLHQQIEYKAQMQNINVIKSQLVAEKQMQTMLETIELDKRDEFIAKSLSQIDIKQKKK

SEQ ID NO: 2090 - protein, 637 aa, synthetic construct
  REGION 1..637: note = Synthetic
ERALQSRKGGKKDRFAEEARRPRTQPTEDISRVRVAASSTLHPRKSPLGDHKPSQQSKLDPEQLASREWLKEQLTARQVAKPVAFLYNGSWVCRNGNTKIGIIPAALVTARDASAVDGIFVIRASVGVEIVQPISSSTKQAAQYRVKSKTAKSDDERKKFLADAERAEKSAWDELGAMLRTASRVYPFMMRAVTEWCLKGCLPQNPREGEPTSDNYLVAFRADKEWHELHPDAPPQLLHSGIKSVAKKRAYDDWHGWDRSPKTRMSKGPPWNTREGFSLPESCFTLRSEGGQMVCELRLHAKTDDGKNSPPVRVVVAARSGGSWAQLRALTDPTSGCSIDQARILWSEDERKWLMRISFSKPLPPVPTGDGPAIVVRRGVKRFMVVVRSDGERIPREDFQGHPLPNLEDAWGAVTTLRRLEARRGKNRRKAIGPSILELKEAIDNRRRQIKGHLPAQGRGARGHGKKRYLRALESIRRAEANFSQTWWRQWASWLARVAETIRASEVLIEDWCSVPAPWHEDEVIRTMLRRFPTAMARDAIVWALKKRGIKCRLIAAWYDLKRCPSCGADTEVDGKRVYCTKCPAAAPRDQWAAWHVFTKAGYTEIQLSHYISWASAILRAKKGKSNEQDPRNKAAE

SEQ ID NO: 2091 - protein, 561 aa, synthetic construct
  REGION 1..561: note = Synthetic
KGDLHSPKGEAKMHSAKLELTRSSPLHPGDLDSSAAPSKGPKSLGSADLDLAREWLTSELLLRGVQKPVVFRARKGHGVEVKDGKRKLGQLDNTELLTHDTSAIDGLFRIRGCLKVELNPADAAESSWLLFGLSRAVVAGQRAAVLSLFRGDNGTVNAGTHAYRVLSATVTDFLSKSKDDRVHGLSVCGDVMAMASKLAADKFALWQRSNQADQSPPWFTSISMPIKDSRYRLELQGRELYVTLGVQGAVERRIPEIRFKAYGRGPSAWADIRRLLSGEYARAAARLVWDCNRRRWTLNISYSRARPELQSGTGAMAVCPGIDSFVRCYTDDAWKGPQDNTASLVAFKLGLDARKASRGQHKDFQGHGARGHGVKRFTRLLRHFSELETNFTRTHIEQAASRVRRLATGDRLGKHGWNETRGPVGEVLVADFGNFCPTHSNARVEKILRRYPICTARDKICWALTKAGIPHRVVKPTNVCPHCGKSKLKHFCGYDWVCPECHLVAPRDLWTGWQTFVAGGASSHYDLIEVGKAFKKAAEFADSVRRKAINHGTEETDEAAQ

SEQ ID NO: 2092 - protein, 506 aa, synthetic construct
  REGION 1..506: note = Synthetic
KGAFHSPEGEGLRPAQPSPRKRSDTSHRGDSPPTAPKPKKPKRTEARERSKRLVAAVDLEVVAPVQPATWPELRGLLWEAGCAVPEAQRAVVSHLIARDVRQDRQDVAPATEAYQVAIDALEQRRLRAKTPEQAGLRLRLHTGNVVCVASKMAADAYATWRKGQYQAGPKKGPPWYKRPGIPLHHRAIKLVQTKDGVHCSIGLFGMTEDGHRQPPIVVGVAACGGSAWATLHRLLTREWEPRAARLVYDEEQRKWKLKLSYEYPMPEQATGERVMVLRRGLHRFLPMLVDDGTMPAPLDAGSSLIAFKRGIDARKAAMRGHLPWQGKGARGHGKKRWYRSYDRLGQLEANYVLTWCRQQAAHVAKTAVKLGCSRVLIEKFEESQPPTHPDPFVQKLLRRFPFCQLRDSVKHALVKVGVELVGVKSDHNAQRCPKCGSDDPAQHDRRARWFRCTKCEVGGGSDFIAMWNTLVDMGIDDAAVERLAQKSAAIVKAAQRRQKVEIEDGN

SEQ ID NO: 2093 - protein, 614 aa, synthetic construct
  REGION 1..614: note = Synthetic
AGRLHEPEGEPYEVSAKPLTGGARPPDVSPALVSRHFTMQDTIGADNGGRVGENVSPALVSRHSISHTADEDENTGLDLSKYSDPESAVWLLGILQKLDIERPKVRETRQGWELRDGRVKLCHTLRVDEVLKRDPELIRDEVLRLRHVIALRLCTKKRDDLPLADMFGSVAQCIHFVRQEIVWDLIRERNDKVDSDGKAIPIDTWAYNRAAKACKDWKAAKQKQKKPKDDRERQKRLLDDVFTWATSLIGTNAREFTGKFNAWRNSGLEKTAPPWPRSTTFSIKSNSVKLAIEKIDNRDQLFVTLSMFGVEDGHRLKQPQIRLYPGDAHNWSVVHKMLSGEYRQESAKIVKQDKDWMLKITYSHPKPKPAEGGSMLMLRSMVNFACFCTNDGRSPREGIKANNLIAIKAQLQNRRTAIRQSMKLRGEGSRGHGKKRAYTFYQALSNKEANYVDTWCKLFAVEVAQTCKNFGCSELVIEDFGSQVPEHSDTRYQAILRRFPFAKLKDTILVACAKIGIKTREAKSSSWAKCPLCDSVLAKDRNVMCCPTCDIDSQIDMWRLLRMAKNAELPFDGLLDTMHMQTKVIRKESLTEPEPEPEPEPPKKVRVRGKIVPR

SEQ ID NO: 2094 - protein, 468 aa, synthetic construct
  REGION 1..468: note = Synthetic
VGALRSPKGEGESLSANRESDIRQDDSTLILSDVAKLTSAITLRIWPNKAQTDMLWAAARCMPHVEREVTLGLLKGEGEGVAPATYACRKAVAIAKAWGEIPAKPRKDGRLPDACWRWGGAFVGEAAMHAATRFATWKKKNLEKASPPWAKSVGFGVRTDGVRLSKNGRRVHVSLAMLGMRDGHRQAQPVFIVTVEGRQSPIVLDRILAGEYSSKSCRVVNKDGKWLLKVSYQWPKPHSTQAKGIMFVRRTTNKFLVAMTLAGESPEPLLETRSIVALKTQLDARKKAVRQGLAHRGSGARGHGVARRYREYTRLDGIERNTVATWCQQQAAWIAKESVRLNCGMVMLEDFAGSSVPVSEDRRLQTLLRRFPFAKLNECIEWACKKHGLECSSQVVHTSVECPVCGEVVSDRSGWKVCVCGLCVQKDTLAIWRIILAAKLDTVGMVKRADHEARLAKTIERSRTHGVV

SEQ ID NO: 2095 - protein, 515 aa, synthetic construct
  REGION 1..515: note = Synthetic
PIIARAIQAIQDKAEQFGVTLEGRVSISPNNRIWKVRQGRATLGRMTQDQLTRCDVDHLFVIRRAVWVDVVKPAGDTPWPEWSQPLFALQWALGQLKDAALDELRLSAHTGENEVPLATLAYRTIQSETQQQRLRQDALRRGRNSRTWADRATFSVGGATASCAGQAVHSAFQRWQRGEIGYPSWSGPKSSIPLRAAETSLTCLDEDIVLRFNATGTRQECLVRAKGWSAQKTIEKIIKGTCLKGDANLVWDEKKRRWRVSISYSMPRKQPAEGANYLAVRRNVHDMLFVMDSKGKTYKACQGIGLKIIHVRSHFLRRKSEIRATLNFQGQGARGHGKKRFYRSYTKCSDKEANAIDTMLKQLASSIRKAAESAGASSVLLEDFALPWTPEAGDPRFVRLLRRMPWTKAETLLRRELEEHGIRLVTMAQAHNTTTCPACGADLRQVDARHVECDSCQLLCTRAIVATWNMFLAAEVPVEELAEVKRKASFIGREIRRRNQEVEAAKSLADTIAAE

SEQ ID NO: 2096 - protein, 520 aa, synthetic construct
  REGION 1..520: note = Synthetic
VRAVEVEAEALGVELAGRVTARHVKTKAGTGKGIEVRAGRAKLATLTRHQAEVLDVSRCFEMRRSLLLSVGIPKSVSWSEWSEPVRATQWALGRLMDRAAVLLRIGEVTGSGKSVYQTIVDPEAQDELRAEAARVYARTKSPKWKARSEFTLSGAAASQAARQVEMFYRRWKLGEIGFPSWSGPNGSIPLRAAELTFERDGDDVRCRLPIFAGRGNGHECFVWARGFAHQRMFDRILDGEIRHGDGRLIWDDRKRRWQIQLSYALPRPKSAEARDTPVYLVVRRDVRDVLQVSSSTGREGIDIRGSRGGPSNTRAIGVALLEARGKFHRVRKTRLERLPLLGRGARGRGRARLFRDIRRCSDDEAKTVDTLLRQLASAIVRRALAEGVHEILVEDMSLEWRWHGASNERFARVVERTPWSKAVEYLKQQAQEFGIRIRIVARAQDDLTCPSCGAEAKRDGEYTDCEGCGLLVDRRLVAAWNMFKSAGVDDTALKEVRLKASYMTREMRKKVEKQNERRGR

SEQ ID NO: 2097 - protein, 484 aa, synthetic construct
  REGION 1..484: note = Synthetic
MIRAIRLELLKPTSEGWETAGPLLRTLAKATPKLLNAALDARIAIEVAGKDAVKAKIASEARASSGDGLAYQAVLRGVERLREWGVKKKHPFADLALPGGMSSAIARAASQAYARRDQERPRFASERILVRSAETAFVKDDRGVVLTVQLRPTGRVKFATAHSWGSHRETLDAIVSGKIEHGDCKIQWDERRRKWYGLVSYTAPEPVSREADAGRVLVVHRGARNALYLLPSTGERGLPFPGSKLLAQRRRLSARMREIKRSSQFERGSGSKGHGRSRRYETYSALEDKIARVTHTFCQQAAAFAAETAKRLGCGTIFIEDYGGIGPDEDVQVRRVLDHGPLYALKQAVEHRAERDGIALKEVESAYISSKCPRCETLDAGAHNHRTGIFHCKVCEFSRPADWVAAYWMLSNGGGDMGPLHERLRREREFAATATRRSGGWRAATVGNRSGGGVKEDIEDGQANDDVRATGRRVQGAEAQVGAE

SEQ ID NO: 2098 - protein, 453 aa, synthetic construct
  REGION 1..453: note = Synthetic
PKMLVRALRAELGKPIDMSWDDLGRDLRRLRAVAHRAINAAATACEVARVCNWDVAMETVAYRATQWELAGFYAWAKEHKDPSVRALAEIEPGGGLTSGWASAGYQAWQRWQKSGRITSLPTAKQGAPIELRKQEVEIRTDGPSVVLDLRIADKSRARHVVSIRPSKGGHWARLREIAEGKVQHGAVKIVYSPSARRKDGKRGKWYALISYSMPMPAKAAPESGGALVVHRGHRNFLTLMSSSVGLVKYVGGYGMRNRWRQLEARSRDAKNGLDEIGSGARGHGRTRRYRTHGLIGDKIHRCKQTFCQQSAMKVIRRAKHLGATVIVIEDYGGIEPHAERGVRRFLDRFPMFMFKQALVSACEREGIALEEVPAEYISSTCPACGAQNTGYHHVSRNMFHCGECGFDRGADWVAAYHMLQRYMGPRPNAPRDNLRNERKLAKQLEGSLSDAAE

SEQ ID NO: 2099 - protein, 459 aa, synthetic construct
  REGION 1..459: note = Synthetic
APTETRALRVEIVKPLNNGGWETVGAQLRALRMVSHRVLQSVFLACVAQERVNRTLTKADATHPQTAGYRVVDGEIDDIKAWAKKALKKKAAGERVELLKAIAELNPSSRMKLGWSSAGYAAFGKWSKDKQKNAMPEWRRGAPIAINRDGVKMRDDGTGLVLSVQLDPAGTEWTDFAIKCGKGSHYGRVREMTSGVVRPGEVKLVLDERQKKWFAFVSYTRPSPSAPSECDVKKALVVHRGIHNALYLVCSDGRSYPIPGAKLLATKRRLVARRHEMQRIARCERGSGTHGHGKARRYAAPDSITDKEARVVRTWCQQMGAEVTKRVKAWGCGTIVIEDYGGIEQTGDARQRYLDKFPFYQLKQAIEWSVSKVGLATTEVPCEYISSVCPVCGNADLRQHNHRTGTFHCAKAACGFERAADYVAAFNMMKRAGFGDGLRKKLKREIDIVAVTREITAAE

SEQ ID NO: 2100 - protein, 511 aa, synthetic construct
  REGION 1..511: note = Synthetic
TIKADGRCPSCIVTAVLMEIVKPTSENWDDFGDQLRGLRSLTHRMLNAAMIGLVSDLHNRESKKDCAGFTDLSFWREVDLHNRDTSQDIDSGQSTYKHINAELRSYSAWCAGQRQQKQEALDSSQLALLKARPGKNKEKLTADVTRFDNEVKRLASRENLASTMSMSMVACLGKTADDKFRQWLKVRIEERLPMYKKKSPIMLNNMDVRIQLIDKSSVQMSLKLRSKGTTHVIALPVSGSAWQAMRLVASGAAKHGAGKITYDEAKKKWFLRLTIIRPRPQRPPMNSDVVLAVNRGRNNFLYAISNDGRTSRVIWPGNDILQFKKSIRARTLDLKRMRHHRGSGAHGHGRDRFFASETRLKDYEINFVRTLCQRAAAALDQQAREIGAGTIVIEDFNTIDSEDLRYVMSWPWYQLKQAIAWMCEKTGRTLVEVPSEYISSECPNCGNRDVSQVNHLGVFHCKGHCTGYKNGFSRESDFVACYTMLRRSNVDMSGWDRYFKITDKISAEAAE

SEQ ID NO: 2101 - protein, 471 aa, synthetic construct
  REGION 1..471: note = Synthetic
RLHACVKAEIIKPIGATWEEVGPHLHALRNVSHRMLNTAITACAIADAERGESKKKLVFESVAYEATKTALERDRDFAQAMLAIGKTKDPIARERLERRAMLSVPSNIYNAASMKASQRYKTDRVEVFTGKKSLPSFRSGAPIFVRDGDRAWSIVKDGNGYTLVVKIYGGRSGSVRFALAFDGGSAFAHAKRLTDEEAIERGDIKRGDLKLVWLERKRKWLAIMSYGFPKPLCTLEPNRALAVHLGIRSFLTTATGDGDAGPLFDGGDIVAFKGQMDRRKRSLQRHRRELGTGARGHGVERRAATYRKLEDKEQRFVRTKCQQAASAVVKRAAAKGCGMVLIEDYSPKEMADGASEPGARFLRRWPFAELRACIKWACEREGIAVKIVPAAYESVTCPKCGNVDAEQDDRRGTFQCRRAGCELRRPADVVAAWNMLRRGGEDPGIEKSTEKTKEFVEKLKKVKTTKRKAAS

SEQ ID NO: 2102 - protein, 367 aa, synthetic construct
  REGION 1..367: note = Synthetic
VIKARFGKWRKQRFAGHERFPSFTSGTIMVRDTGWRLGRDDKGLVLSVKLHAGLTERVQFALRADGGSAHAQARLLASGAASIKQGDCKLVWDDSDKKWSVRLAYTRPLEDAKALDPSRVLSVHRGVRCFLTWADSDGGTGILKAGAGQDIANFKKQMTRRRAGMRSHMAGSPRHRGHGWWRKFDNYRALDDTEARFTDTKCKQAAAEVRKLVLAGGYGTVLLDDWNVRQMAAVVAKFEGPYAAWLVRRFPFAQLKGAIECALEPHGVGIVASPAAYESIECPSCHNIDASQDDGRGTFTCKACAFKRGVDGVANLNALARAGIDGVLAKQDEPRKAWLESAGRERSDGKGTNSGPRKGGARKPVRK

SEQ ID NO: 2103 - protein, 495 aa, synthetic construct
  REGION 1..495: note = Synthetic
PLVVEAALDDAAVDAQIVSTLRLEVIRPLDHDWAALGPLLRALRAPIHRVLNGVITDLEVEERAGKLGAKKAGKILARSRSYQLTRDLWLNEREAAAARVKKGKPYYGDEKVATTYPGAKVLLGTAGAAFTRWKKWRKEKWKGKMSLPTFRGGSPIYIASGNGAIRLEPSDGLAILTLPLFGEDSDRPTQVRLVVKPYGGSGFASLKRVLADPACLGDCRLVEDDDRDGKRKWMAFVSFTSEVRKTETGRTMALHRGVRTFLTAAIARGDDGREAYTTVLADGGDVLAHKAAYRARRSSLGRHKRELGDGAKGHGTARREEHFTRLEDAEARWVRTKCQEIASHAMRLAERRGVSRILVEDWGNPAKDGAPELGEHVEYLVRSFPLAQLRESIEWAAKKRGLTVEIVPSDMNSRTCPSCLHEHSAEVSATFGKSGKFCCEVVTCRLERPVDVIYAWNMLLRDGKPLPLPDQIAAIKRASGRIRKKARTEKAQAAE

SEQ ID NO: 2104 - protein, 477 aa, synthetic construct
  REGION 1..477: note = Synthetic
VVKAAIVKPLGDVTWEQFGSLLRALRAPLHRVLNGVVRELEVPHYDREDWWADPKDAAGLASPRTAAYRIAGTVWREECEAAAERVARKKEYPLDRVIAEHRPSSAAQLGAASIAFTRWKKFDKDRWRGETSLPSFKKESPIYLFNAGVQLRAEDGQYIASLALSGERIEVVLGVDGGHEHAKIAKILSGAARSGDGKIILVTDRHSKKPKWMLYLSMSWPAPERQEGRTMALHRGIKSFLSCAIQRSDTGAKDAFSAILETGEDLLRHKEAYSARRRSLGKQLRQLGAGARAHGKGRRYEAVTRIEDAEARWIRSKCQEVAAHACRLGEHKGVTRLLLEDWTNPARDGAPHLGEHIEYVIRSFPFAQLRESIEWAAKKRGWVVEIVKTDYNSRDCPNCGHRHDAAQVDTFRCANCMLERNVDIIFAWNMLARDGKTPGIEEAKQATKRVRGRMRPGKESNKTSGATAGPEREGSGP

SEQ ID NO: 2105 - protein, 542 aa, synthetic construct
  REGION 1..542: note = Synthetic
EGRLIRPEGEAQALTNAGVTNPQLHSNTSQEASGERSSIDQILGVDLELEVKVVSFSVLYDGDKEKFERLFALRERMHRVLNTAISEWHRADKHISKKSGKETFDRPLPAVLSLMERERSYWSRRLLDCEIQGTKIGRQLIQARAACSPNVADLEQVYTLAEKAIFRARIRSQLQMPCSIYDAAIRFTKQRYDLYKKAEFRGDRSLDTFRSDGPIRWRDKHWEIKPGEKRGHYSLELELHSDENGKSRRIERGVFDLIPNGGSMHAYAKCMTDLEAIKRGDVKLCDARLLYSKSKKQWFAKLTIKVPKKIASSFGTGVAALRRGVKNAFVLAFEDGDVRFIPGTEVLAFKRKLKARKVSLGKLGSSLAIGSAARGRGKTRRYKAWEKIDDAEARYVDWRCKTWAAEIAKTLVKRGVNVLLFPEIGKNKDMAEGSEYIEALLYSWPFAKMEDWIKRTCEKNGIEVKDYKPYWQARRCPNCKHTHEKRQINTFLCEVCGFERPVETIVAWNGLLDVVGPQPLEKNKKKKQAIRDLFTSPELSGV

SEQ ID NO: 2106 - protein, 537 aa, synthetic construct
  REGION 1..537: note = Synthetic
PLQVLKDERALTNKAAVTTPRQPTPKPGQPAGGGATGDVEETTRDTVVVQFSILYDGNQEKFDRLWAMRDCMHRVLNTAISEWHRADKVASARNPEKETLARGPVTDAVKALLEREREYWAKQVPKAETEVAKLRVDLGRAKSKERLEEALTLSTRLEFAQKRCASLRIKATNQMPSSVYDSVVRWTASRYAIYKKDAFRGDRSNDTYRAGQPIRWRDGSWALVREVDAKGRYNLTLELHSDGKHVERAGFTVIPDGPSMHGFAKRMVAGGDTVKLCDARVVYSERKKQWFAKLTIRLVRKASRPLAGTTAALRRGVWSALVLVFEDGSIRTITGGDVVAFKRKLKARKVALGEHMGQMEAGDGARGRGKRRRFAALRKIDDAEDRFVDTRCKVWARMIARECADRGVGRLLVAKMNPKEMGDDVPGVVQAMLRNWPFAKMLDRIKQSCAKIYVDERGRATRDALAATVSVELAPFDAHWDARGCPNCGHVHDERQVAPTWECDKCHFTRGTDQIVAWNGLKRELKRHPGEPKPCTS

SEQ ID NO: 2107 - protein, 544 aa, synthetic construct
  REGION 1..544: note = Synthetic
HTSVAKAELIKPLDGTWQEHGTHLRDLTRLWFRMLNDGIRAAHLSISLGVSAKDRGDMIYKAVVDFVDEDKRWNACSINTSVKRKKLQPGQIAARGRRAKIEVPSLICHAAYRRAEQAWKVYAATMNEGTRAIPSFEDHTSFHIRDKAWRVEKNGRDYILHVKLHGGRGESTWTQFALGIEGGSMYEHFRRIALLENADKLASKNKLTPEELAERKALQAQGEDTPLTPEQEKRLEALAPTIDVPLGPNAIKRGDLQIRWVEARAKATKKQKREGKKGMWMAYATYTREHLPAVLDRSKVMAIHRGMHSLLTYATLEGASSILIPGDAILEHKRRFQARRDSFRRHRRARGPGGIGHGTDRTHREYGQMQDSEKRYVDSQCQQWAAKAIHAAQAQGCGVILIEDYGTIKNEDPRFIPSWPWAKLKSTIIAAALLAGIEVREVPSGYISQTCPCCGHISAENRRWGSGASASTAAARLTGDIAPGRGDMFHCVSCDFHRHVDPVAAYNMLRTAEGFGPETFNRFQQTLRKFQQAIEDQQPDKAAE

SEQ ID NO: 2108 - protein, 486 aa, synthetic construct
  REGION 1..486: note = Synthetic
TGWLPQVRRKDAQGAWNNISPPSPSVALFEILKRLQQRVRIAGNAALLSMLKESDKTEVVGANEIAKQNERYPFETIAYRTVVKAYPDATYLPVVSSGGLCAALSQKVAKEFKSWIGSRQRDRFPMLSDGWPVWTRKDSWRIVRDDGLNVAFNLDGTWWEIGLKIPRKNTKMPADPFVMRVLERLVKGEPLRRDGGAPTVSAWVPGEIGFQFKRGKWYALIQYAQPEPKPFEGQNHMVVHCGLKTFACVATLDEIRTGRIGIREDLLDLNNRKARFRAQRKDLARAQRRRGLGHGYSSMRGRNKPRLTSADLAAKRVWVDDAESRFTENVLRRLAARVARRARAAGAIVHFMALDNIRVRAQHSDLPGRVKVRVHQAPWFKFREFLGQRLAAFGAEIVPYKPYYHTQRCPGCGAISAAAPNYKRWKFACVRCGYSNDLETAAVANAFVDLGLLSVKEAAKSGEGASAGREMAELRGLDLPPPRAAQ

SEQ ID NO: 2109 - protein, 472 aa, synthetic construct
  REGION 1..472: note = Synthetic
LEPLSIVRATGKIAVDTSLLADNESHALRKRLLEVRRSLALAANIAVRVHWRVDARIVQRYLVHEQRAPKAKEWQATEQELRDAIDEVAPLVTPAVAQVLTDKCLRKGQLDLFSLVRQIAPDVSSGIASALNRKVMQRWRTDRFKVLVQHEKAPPHYRGTLPIPIRASDMRFVRDGRRFLMTFNLSPGRHKGGEFTLPIEPRDGYQRQLLGDLADGVVKIGEAALTQDRLRKRKWFVRLAYTKQVPKTVETKRAAINRGITCFLAAVTDTGEQLLYDGDDIVAHLRGTQARRRQFQYQVKASGRVGHGRTRTLKPIDHLAGASDRWRDTRCKTIAARFAKWCDDRGVGVVLLEDFTGIRDGLPEKLQGGEYAWQEIQTWPYYRLQQDIQSALESYGIAFEQRDPAYISQTCPKCGHVTEDNIQLRRRKLVCVECKHTVHLDVAACENQLQGVTAPKSSPRKKKPVGKRPKKK

SEQ ID NO: 2110 - protein, 527 aa, synthetic construct
  REGION 1..527: note = Synthetic
DEAAGKLADFANMELSRATTRFALDLRLLSPLAPKGIKRELSDEEKDARRALERCSLLCTTARNVAIRENVRRDGTALDTWLSEHGGAMPKRGELKYEAAYSYQLIRKVAPALASGIAATVGREVDRKWVGERFSVLHFQERSAPHYRVGQPFPIRAADARWTWDPAHGRAVVTVQLFSGSEPIQRFRLPIEARDEHQREVLRRLASGDWKAGEVKIERDRLRPAKWYLRVGYKRLVPRRVTGPCATVNRGMRCFLVAMIEGREGRRSDAGGVATADGGRIDAVHGETWIYDADDIEAYMQQMQRRRRMYQRGVKASNRVGHGRPRALRSIEHLAGVGERWRQTRCQVIARRLARWLAERGVSRVYLDDFTGIRDSVPESLSSKDPSRQRWIWERIQEWPYFQLGARLEACLAEYGIAVQKQETVGNSMHCPQCGYESADNRDLRNWRLVCRNPASRGGRGCGYSRHLDVALCANALLRSRGDATLRTTVNESAPLLSAPASDEGTARKRARKHLKRKEDGGTGRNG

SEQ ID NO: 2111 - protein, 631 aa, synthetic construct
  REGION 1..631: note = Synthetic
SALGATRSGEATGLTLDNHDAPVASHVAPAKAVGRTPPPEVEQVKTDATQVAPGALSIVRATCRILLDVAVLAADRREHIAKRCGGTEGGCKACQLQQELRGAQREAVRAANAAMRVHWRADADILDQALLATGAPPAKAADWKRFAQIDPERLVRAVSPGLSRGETKLAAGELVKTSKADKTYLSTYRLVRVIAPDLPGGIASAISDSVQSKWQRERFASLVRCTKSPPHYTGTMPLPLRAADCALTHCVDDDYEFTFAIRGGLGHRWTLPISARDGATKKRYLAKLLSELAGSNVKFGACQISEDRMRPGRWFVRIAYTRRVDAAVVGKNDCAIHLGIVNFMAALGSDGERFIIEGNDIRTHLAQIQARRRSYQRQIKYSNRTGRGREAALAASRKLAGAHERWVDTTIQRIARSIANWVKEHGYSRVYMPDFTRVRDSVPELLERSDSVYQWLQEWPYYRMQQAIRSCLEEVGIGCNHECSGSRARPPTCSCIAERGSGVDDGVLSRHACPACGETEALIEDLGIRTFRCESCGHHGPLDVVLAELILARGRERRGDSDSLIGENGSKLGPPKGKNGGARKASRKYPKSKGPRRAGSEESSVCNVIGAMARRPAAQQLLRQKRVQCAT

SEQ ID NO: 2112 - protein, 586 aa, synthetic construct
  REGION 1..586: note = Synthetic
RGLTAQPQGEEIARYTDIVGEANRAMLANSPLTGASVTHPVTRRDISSADSLLSTIPELNSGNGVEQAPAGECSVVRATCRIQIDLAMVADDKDAHIKRRCGGSNPGVEPCKACVLREQLRHARNDAVRAANAVMRMHWRADADVLDRARVKLGRAPKGADEWKQYHDPHALVRAVLPGLPEGAEKGLKVLSDSGNLYTYAMARLVAPALSSGCASTIAREVAAKWQQSRFECLIRQSMTPPHYRESMPLPIRAADVQFSHVEGDLFRIRFGVLAGKNMSWAIPIKARDSYMRQVLRELTDGQTRMGAVRVQEDRLRPGRWYLRISYTRKVNKIAPAEKIVAVHPGIVTFLCALGSDGDRWLYDGKDIEAYLRQVQRRRQQYQRDSKGSARWGHGLGRTLAPIRKLEDAGERWRDTKIQTLGRRLATWIRDRGYTLVLMPDFSGIRDGLPEKLKGGKRVWDRVQTWPWYRQQQALTSCLEEYGIQVKMQESPHKADTCPKCEHSDNANIHLKRRLFICSECGYRKMLDIVFCENSLACERSGGGELDHEENGRPGNGKKGPLAKRRASPRKAKGNGRSPGNGKNSG

SEQ ID NO: 2113 - protein, 526 aa, synthetic construct
  REGION 1..526: note = Synthetic
DGLLSSPEGEKFPSTPASEPGKMARKRSLNAPKGHQSPTGAGTTGDGTGAAESLDSSFTIVRATGAILIDPRLLAEDPDAHRRQACGGRESCSACRFRDVAHNAQREASHAANTLVRAYWRADADALDALAAELGRLPYGKEEMKRWPAPKLSSNGYHIVRAAAPALSGGVCAAISKSVTDKWLQTRFDALVRQIKAPPHFRSTMPLPIRAQELGGVKRTGPGKYTVRFSISPGSAERAGKEFTLPIEARDAYQRRTLDLLSDDSSRPKIGAAQIFQHRTKKGKWLLRIAYSRIVSKSTSTVTAAINRGMVCFLAAATSKGGSWLYDGHDIEAHLKRIQARRRERQRDVIAAGRVGHGRSRTLKPIETLQAAGERWRATKCQAVARRFARWLEGEGVGTLYMEDLAGIRDADAESLEGGRAVWERIQEWPYYQLGMRIKACVEEVGITVKEVPAAFISRRCPKCGHVDVERRGAAPRVYRCSQCRFSRHVDLVAAMNELALASGVWDGNVGAEHNSEGKPRRGGRR

SEQ ID NO: 2114 - protein, 506 aa, synthetic construct
  REGION 1..506: note = Synthetic
SGPPPRPEGEKHTGHAGSSGEVSSVALAKRARKSAPSTAPPTGGDGGTAGSLEETIAITRATAKIAVEPWRLASDPKAHAEKRCGGAEKCRACGLLKSLRDLQRSAAWAANVLIRRLWLADATSLEEARARALAEARPFKGADWSAAKLNHYQIVRESAPELVSSSAASLSRRLGKKWSQCRWDALVKQSASPPHFRATMPLPLRADVIKIAQVEDGLFRWSFSLRAGRHSGGAEYVLPVHARDEYQVRTLRELVSKNVKIGDASIIQDRRRPSRWYVRFSYTKRVSAPPRTGVVAGINRGLVCFLAAVTSTKETWLYSGNDIRSYLAQIQRRRQSYQRQVVASGRVGHGRNRALKPIDHLEAKAERWRQTRCQVIARRFVKWLVQRGVVRLYVEDFSQIRDSSPDTLSSEAKELIWQMVQEWPYYQLQTRIESCCQEASIEVVTVSSHKIAQRCPNCGHTDKANMDLPRRTFRCGKCQFRRHLDVATGMNVIHVGEHGGDEKPPA

SEQ ID NO: 2115 - protein, 506 aa, synthetic construct
  REGION 1..506: note = Synthetic
NGLTPQPEGESVSGHAASSEEESPETLANKAREAPRSTAEEGSPPGNEPPLSPTKTTKITRATARLTLDLRRRLDDPDRVWADELDKALIKAQRECSRAANAVTRILWRADGETLDALRKANNFSAKNWPFTKINTYAIARELAPELNTGIASAVSRMAMVKWGDDRWDALVRETRSPPHYRSTMPIVLRAQELRLRQDKGVFRLSLSLRAGRDARIEIPITPRDPRQQADLAKIATGEWKIGDARVEQDRLRPRRWFIRIAYTRFVEKKTGGITAAINRGIRAFLVAATAKGSHWVYDGEDIEAFLKQVQRRRKSYQYASKASSRWGHGRQRTLRPIKPLEDKATRWRETKCQVIARQLARWLDQEGVTCCYVEDFVGIRHSPPEKLEGGVPVWQRIQEWPYHQLLTRLVSCLDELGIETVVVAPQDMSRTCPDCGLVDERAIDRRAWVFKCTAPGCGFKRHLDVTFAMNLRVRGEENQKKRAAGNVVPLAGAKKKRKPRGNGAS

SEQ ID NO: 2116 - protein, 545 aa, synthetic construct
  REGION 1..545: note = Synthetic
AAGRTGSVLATRSRDGDALHASQNAAISRGKGEGAALDAAPTSDADTAPIKIVRASTRFEIRIRPDSSGISLLKALDSVTSDVARARNAAVRANMLADGAWLDAHPEIIARWKAGEKKLEWWGERRTRRNAALNPNGVYSYPVMRAAAPEVDCNVIASLQNSDDAEWIGSRFDVLVRSTRAPRFYKPNQPIRVPHRAVKLVLREDGSADLSLRLQAASVDGAPRYSFHLVGRDAWQREELQSCADGTWKLGDVVLSRHPTKRGRWFARLCYTRLVERAEKGEATVVVRRGVRSFLVAAASTGECRVIYDGGDLVAFNKQMMARRRGLGENTKRGTMGRGATGHGTKRRVGALIDLSDKEARYKREACKRAAHALVLFAQSVGAREVVYEDFAAPKEEGVYWLLKRWPWHELSLACQSACEAAGLATRAVMVRTDRRTCPKCGHVHVEAPVAIRLGDRVWECLACGMRRPPDQVDALDMLRTVVGGGAVERTTAKQKAIARTLALAKEPESLATNNHPKSGSDRERPRSDSDSSSSSGGKRSRRRE

SEQ ID NO: 2117 - protein, 520 aa, synthetic construct
  REGION 1..520: note = Synthetic
MLESQSKKQEIPDSIRNVSTDAAEGDDMDLVRASTRFEIRLSPKHEDGTPHTLNLETLHALDEASQLVARCRNRVARWLYGQDSDWLYAQPLPWPKKIAWSPAPVGPRRDGTTGPIALTTLAYRQAISSQDVARLSSDVVAWASKDVVSKWTEKRWDILVRQTEALLHYKPHQPIAIPHKAVKFALREDGSADVAFRVLSLKAEDAKPIHVHIVPRDAWQREELRALAAGDWKLGQLVVSRHHEKRGRWFLRFSYTKRVPRAEGNGVIAIRRGMRSFIVTASTTGDVRALVDGGDILAFKRQMLGRRRSIGRRARAWQAGQGATGHGTRRRVGALISLSGKEQAWVKERCKQIAAAVVHWAKEQKASEVVIEDFTIPWKEDAWREVKSWPWYLTKESVKTAVENAGLKFRELSVASNRKRCPVCKREHQVEPVDSYGRWECESCGVKRSVESIVVLNMLADAGRPEAVERAEDKRQAVAKIVARATVSQKPLEPLAGKNEKSRAKMCNGIRGKRNGSGKK

SEQ ID NO: 2118 - protein, 442 aa, synthetic construct
  REGION 1..442: note = Synthetic
VPTRVTTLKFEVAWPGWRKSDLSALWSELWRAQDDLRRAANRGITALYQVRAGLLPRPEKDGKPVSDQTLSYQILSGKWQPYGTPAYVPSPDTRQVSSQVILELASVLHTRMKTDYAEVQKGNKSVPTFRSVPVGASGGGVKVDQELGTISMPLWSGRNASRVVLRPRKLDGRSWRIWRSATSFGNARLTWDRPPGRRGKWMLCISAHVPVVERTAEPMICAVRLGLYTSCTLAFAEISSGKLARRSECINLPSSTWRAVRRVQAQREERGLWNRKDHGQREGRGRQRKLRAVAMLADQVARITDTAVCQTAAAVVAMAKRNNAAVIALPDLARWSVSKEMDSTADLPSPDRAEARKRYFSMHQGALREKIRLAGQREGFRVVDVDVRRSSVTCSECGAENPEYLTDAKWECSCGCKLTSEVNTAKVLAKRAVANLNEKKAE

SEQ ID NO: 2119 - protein, 260 aa, synthetic construct
  REGION 1..260: note = Synthetic
VVLANNRRDPKAGSVLRQLADGTLRRGVASLFQKKKNWYISIPYEKEAAEPDAPFVSGLVMGVAFGVQCALAYAFNRSPRRGALATDEIEARETRFHERKQKLQRQYHWSGRQGHGSEKATQPLQRLQEKERNYRALVNARYAKQIVELAVKNRCGVIHLESISELKTQKATIALARWPVADLQNKICLKAEEAGIIVQKCTVPDAAIASDTETEKNETGCTNAAPEYNATTKTENRKKPLLYEADYAAAKRLAEYESGK

SEQ ID NO: 2120 - protein, 419 aa, synthetic construct
  REGION 1..419: note = Synthetic
EQIMQRSIILKILRPYDESIKWEKLGYLLRGLSYKVCKISNYCMTHHLLRALNLETENLNPQGHLYCYPRLAQDYPDVPAGILCAAESRARKVFLKCGKEVLRSETALPNFRKDCSIPIPVAGYRLLKAGEDTYLANIQLLSRQAAKTQKLPGRIQLVLAKNWRDRSAGPVLQQLTEGTMKRGIASLFRRKRDWYISIPYEAEAQKTEDGSFAPGLVMGVVLGTQCALAYAFNQSPKRGAIGGEEVLAHKEKFRARKKHIREQYNWSGRKGHGRGSALKPLQALYEKERNYRNLTNERYAKWVIEIAKKNRCGKIHLDGGRTGGTGTPPVMLAYWPQAELRKKIRYKAEACGIEVVECDSRGIWNRCSKCGAVQEAPGDMRWFTCSQCGYGKDDKKTSSSFVTVDYNAARNMAIMESKP

SEQ ID NO: 2121 - protein, 493 aa, synthetic construct
  REGION 1..493: note = Synthetic
TNIMNKCIKVRILKPADPDMSWKDLGDLLHDLSYKAYRITNFVLLQEYLYAMKEEHNPEYLNDKGKLYLYPAITRTYPELSSHVVNGISQNASKLFRTHAKGIFRGDETLPTMKRNAPISFHNKGYTLTREPVTYQDKTQEMFVATVTLYRKRDAKEKGIPSRYGLVLADNWRDRSARVLLGRMADGTLRHGDGKISCKHGKWYLLIPYVVEDIEKPALKDDVVMGVKFGTDVAFAYAFNNTLTQRQVRGGEILAFRKRIRERRISIQNQYPVSGRKGHGREKALCVLRALELKEQNFRARVNYRYAKFIVHQALKEQAATIRLEDLTGIVKPDSDMVLKNWPFFDLRTKVTQRAERYGIKVETVPAQKIAGCCSQCGAVYKNEDGKAEILPTEEFFVCSECGYGNGKSLYHEGKRVPSAYNAARALAKYDGPVQSAKSGTRKDQVIAWRKKHPEGTREDCRNAIGCSKATVDKYWNYGAQKAAETQPKAVED

SEQ ID NO: 2122 - protein, 453 aa, synthetic construct
  REGION 1..453: note = Synthetic
MTKVVKLALISNVTDKDGNKVEYNELNRCLWDLQKETRDLKNAVVRECWEWYGFTNDYYKLNEEYPNERDYLKKVKSDGTIKDYALDGFIYAKYSKKYNLHSGNYSQTLRDACGSFKNNLKEILRGDKSILSYRADQPLDIKKTCIGLEYDKDTNTYYVTLVLLNKNGVKHYNISDFRFKITVKDNSTRMILERCFDGVYGISASKLIWNRKKSQWFLNLCYSFDKAEVKELDKKKILGVNLGVYYPLCASISGEKDRLAISGDEIIEFRKRIEARRTALKKQAAVCGDGRIGHGYKTRMKPLQNVSDKIANFRDTFNHKASKKLIDFAIKNDCGIIQLENLKGVTKNSEGFLKNWSFYDLQSKIENKAKERGIKVVYIEPAYTSLRCSKCGCIHKDNHPTREQFICQECGYRVLHDYNASQNIAVKDIDKIIKAELEKTEPEKKTEEEMPEK

SEQ ID NO: 2123 - protein, 493 aa, synthetic construct
  REGION 1..493: note = Synthetic
MIKATRIPLVCKTERDGKQIPYKDICKILWELQNETRTIKNKAVQLCWEWLGYSSDYKVQNGDYPKEKEHLLSVDKKTGEVKGYALQSFLYDELKGNYMQSGNYSQTIQLVYKAFKKNQGSILKGDKSIVNYKWNQPLDLHCNSIKLDYDKEKNQFNVQISLLNKAGKQKFDIQKPFIFESSLKSKQKGQRVILERCIDGIYKIGGSKLIYDQKKRQWVLLLSYSFESEINPDPQDNILGVQIGVFNSVVASVLGDYDSFKTEGGEVEVFRAQVEKRKRQMSKQRKNCGDGSIGHGYHTRTGPVLNIKDKIARFRDTYNHKISRAVVNYAVRKKCGIIQMESLKGYSQGENGIEGYTKGFIKEKDPFLKNWSYYDLQQKIENKAKEKGIEVYYLNPELLSLRCSACGHIDKANLSETEKGSFKCTKCGYEANSDYNESQNISIKDIDKDEAIVQKVKEIKEEQNKAKAAERTAKKKAQEEKAKAKKEKKKSNT

SEQ ID NO: 2124 - protein, 467 aa, synthetic construct
  REGION 1..467: note = Synthetic
AKIVKLQLIYKSDEVMPYKDYCKELFALMREMSIIKNKIATYLYLDKRFSVALPIEKDTKVKSASGLASAFASELLVNYKTGEVEVLKNHSSNRSAAGQDVQAKFKKFLKESMGAYAVNPPSFKDNGTLCLHDRCIQIYYDEDNKDYGAKLFLLSHSYAKELGIKSSNGFDYKLLVGDDSSRAIIERIIAGEYKISASNLKWDKRKKKWYLLLCYSFTEKRTTSYDPKEYENNVMGINFGVICPMYMSFNHCKNRYNIEANEIEAFRKQVEARRIALRRQRKYCGDGSIGHGKNKRNSPAMKIDDKIARFRDTCNHKYARYAVDMAIKHQCGIIVIEDLTSIAEKEERLFLKTWSYYDLQNKIEYKAKEAGIKVIKINPQYVSRRCSKCGYISFEKEENIKAPDYRKFHCVECGFQSHVDYNASQNNATIGIEAIIAEQIKEHNSENVKNQPAAKAAKSKSKIKETA

SEQ ID NO: 2125 - protein, 458 aa, synthetic construct
  REGION 1..458: note = Synthetic
IYYMTKVIKCQLISRNEERNLDYKQVYKILWELQRETRAVANRCIQLSWEYNNFESDWYSKYKEYPSKEQRAEVTGGYGSMSGVIYSVVSKEFNKLMTGNLSGTVQNATKKFSNLKSDIYKGNISLPSYKSDIPIDVSKKAIELRYEEDNSGNGVKEWLLDLSLLSRTYSKELGQKNGKLTFKIVAPARAAGTVRTILERCYDGVYTISGSQLKYDKGKWYILLCYSFDKKPEELPKNNIMGVHIGEQNAVTVSFSNSRKQLSIDGGEVQAFAIQIERRKRNIQNATSKRSVLCGGGRCGHGYKTKMQPLEHINDKISNFRNTTNHKYSREIVNWAIQNKCGVIQLEDLTGWATEELERYTLLKNWSYFDLMNKIEYKAKEAGIKVVKIPYKPLHSWCCDCESATVIKQRDEEDNVTFVCEKCGQLINRDEHILRALIIPDIDKVIKEKAKEKDEQEE

SEQ ID NO: 2126 - protein, 480 aa, synthetic construct
  REGION 1..480: note = Synthetic
MTKIIRFQIIPAEPAGEKENGLSFKEYYKILSILQKESQQIANRCVQLIWEYSGLESDYLKKYKEDMKEMPGPEKTKLIGNQKRKIAKKYLGYSNITSYCYSRLTKEFNHLQTGSLAGISREVCSKFRSESSSYKRGQKSIMSFRDNFPINVAKKSIKLSYDEKAHTYFASLGILSSSYKKELGIKKPLSFKMLVKDKNQKNTLNKIKKGDYSIAGSSILKKKTKWFLNLSFNFQSIPGKKIEGRTAGVYLGFNNAVIVLINGCSSSLVINGGEIERFREKIEPQRISILKQCANCRDGRIGHGYKKRTEPARNIGNIISNYRKSINHKYSKLIVNYAYKHHCEKIVIENLKGISEKSKYLKKWSYFDLQTKIEQKAKEYDITVEKASQAYLQCRCSHCGNIVFDALSRDEFDCPKCGHKDKFDFNTCRNLTVPNIDNVIKHQIKSQIEEKKAYEKQTEKTAEKYQEIEAKEEARKLDNL

SEQ ID NO: 2127 - protein, 463 aa, synthetic construct
  REGION 1..463: note = Synthetic
KSQKIELILLETNGNIENTRKILWELSSECRTVANRAVQHLWEWNGLSSDYKKEYDHYPSKEETTQLLSGKNSIDTYAYSKIIPECRYLATSSVQTIIRDVKGTYMKSLGEILKGAQSIPSYKNYPIPVKKQTLSVSHIVKYNSNGQPCDEDYFVEAGILSKKGAEHFKTGTRVKFKLRVKNKSLKSFLKQCKEVIELSEIDGKVTKNGCCCEEKLFDIVSSSISYDERNKKWMFNMGYSFEAEQTPYFEGKQVGVQLGYHLPVCCAVNDGLERFYIRENEIEEFRRRTEARRAALRQHTAYCGDGSIGHGRDTRCKAAEKIGNIISNFKDTCNHKYSRAIINFAVAQKAEYIVIENMSGISENNLFLKSWSYYDLQNKIKYKAAEVGIKVKIIDPQYTSRRCSKCGHINIKKTDVDANRMFICEECGKKADFDYNAAKNIAETDIEKIISMQKVTQGIEKIK

SEQ ID NO: 2128 - protein, 641 aa, synthetic construct
  REGION 1..641: note = Synthetic
TLTSHRTVCAHLHVVGETGSLPRLVEAALAELITLNGRATQALLSLAKNGLVLRRDKEENLIAAELTLPCRKNKYADVAAKAGEPILATRINNKGKLVTKKWYGEGNSYHIVRFTPETGMFTVRVFDRYAFDEELLHLHSEVVFGSDLPKGIKAKTDSLPANFLQAVFTSFLELPFQGFPDIVVKPAMKQAAEQLLSYVQLEAGENQQAEYPDTNERDPELRLVEWQKSLHELSVRTEPFEFVRARDIDYYAETDRRGNRFVNITPEWTKFAESPFARRLPLKIPPEFCILLRRKTEGHAKIPNRIYLGLQIFDGVTPDSTLGVLATAEDGKLFWWHDHLDEFSNLEGKPEPKLKNKPQLLMVSLEYDREQRFEESVGGDRKICLVTLKETRNFRRGRHGHTRTDRLPAGNTLWRADFATSAEVAAPKWNGRILGIHFQHNPVITWALMDHDAEVLEKGFIEGNAFLGKALDKQALNEYLQKGGKWVGDRSFGNKLKGITHTLASLIVRLAREKDAWIALEEISWVQKQSADSVANRRFSMWNYSRLATLIEWLGTDIATRDCGTAAPLAHKVSDYLTHFTCPECGACRKAGQKKEIADTVRAGDILTCRKCGFSGPIPDNFIAEFVAKKALERMLKKKPV

SEQ ID NO: 2129 - protein, 631 aa, synthetic construct
  REGION 1..631: note = Synthetic
TTSHQTMFAHLHVVGDDTLPNLHRKVLAELITLNGVATQKLLAICEAGLHFEINAEKKVTRVTLEIPLRKDKVHLIDAKVHACPTEETRQDPRGRAVCKKYSGEGNSYGITAFNSDTNRFTVRLFETYTGTIDGKPKTFTDKLSANFLQAVFSSFFELPFSGVPDMIRIPSLKQTAEQLLSHVLLKVDGEQDAGVPSIGERNPHQREIDWRQSLDAIAFRTEPFVYEEVPANGKKKRVRFRNATPDWEDFLKKPFAARLPIKIPPQYFGVFWRTSEGTRGKRARRLYMAIDLRGIQDSHLWRLLSENEDKLFWWRRHIKSFEPVPFAEKFKLTAKKHLIMIPLEYDMEERFSGMLSDPLRKMCLLTLKETRNTRKGRKNRNGNQTLKAGKALWRADFATSKEVSLPKWNCRILGIHFEDSPVMSWALLNKEGELEERGTLEGNPILESGLVKQETLQAAQKKDKWVGDRGFQQKLRTLTAEIARKIVLLAAEKDAWIVLEDIQWVPKSSKDSKLNRRYSMWNFSALPSKIEWLGIDIVARGEAPHPAPLACKVNDYVIKFTCPECDAIRKAGQKPDKADTIRTKEGALECRKCGFKGVIPPKRSALLVAQKGFATMIKKIVVTAIKKTEKA

SEQ ID NO: 2130 - protein, 649 aa, synthetic construct
  REGION 1..649: note = Synthetic
EKESFRLFHAPFHIALKPPRGPAEKQLLEALLPEVGYAITEMLSSLKMSQIQRTEDGKIGSVMLTVPVSLEQEERAKRLLKQTLKSRIKEGERATARKSALPRFTNAYRIVECISRDGQPPLVVFNIAQRFSWEAEGGSQKGKILEDVDVIPATFLQQLIQSWMKPEVLNNLPSFVRAGACQKAGEPFLSYLGLLEEGSQKEVAFPSLEERRPAVRVEAHRAAIACVAQKTTPFQRVPVRELHPEKYGKDDPAGDQLVNRDPVWVEFTKSPFPGPLPVNFVRSMDVVVYERTWTEPIPARSLKKPVERRRLYVALPVLEGIDSTSPLWHFVNRKEFDWWKSHCAEFRPLALWEGRELRLNKKLVVFPLETTSPQEWFQKELDGGMPSRSVCWSLLVKKHRRIGQRHVDSWEIHIATSRKVAPMLRPNVLGVHFMPTQLVWTLTDRDGNMLEEGVLENPVLDNALLAKTHLEEDQQNLRWVGGREFAAEIRRRTREVAETILALAHGKDANVSLEEIKWVQKRGGTVSDNQSFSMWNYAELAALLEWLGIERASPVESLHEDNGSVLVIAHVNNYNTRYTCPECRACRKGGQTLSEADTLLEGDVLQCRKCDYKGVPSPESKAQLVASVGARNLRNRINAMERERRKEQS

SEQ ID NO: 2131 - protein, 662 aa, synthetic construct
  REGION 1..662: note = Synthetic
QQEVPLTLKGRLQVIDGDVVHQHTVEVLQALHTDMGVGVQKVLSYLQTCLSIESDDAGVVRVDLVFPCPEGFQGRDREKDARKLLAQPVKEKKGKDGKPLPPRVLAEPRYTNEYRLVAVEKCEAGEKPNLRFRLFERYTYAVESGKEKKQTIRMAHTCVPANTFHALLQSWMRVSLDFLSKPFRGGVLRKCAEQINSYIELLAKGEKQKPSFPSISERDPTVKKATWLSALERVAKNTDGFSYQTARELYPAEYTEDDPKGKRLINVDHDWRIVMAGPTPGRFPAFTTLSNSVVVFRREYEKGRRRRYYAMIPVFEGVSPESVMGMRMNEPRHFWWQKHREEFHALKAWTDAVLPVGNTAVVIPISYSRQNSATKRLETLLENGEWQVRIASISETHLPEKHIRHSNEKRMWKQVDAGGKEGAQQVWRNPSKKLPSSRTEWWLKLSLAKVVEPVLRDNVLGIHFETDDVIRWCVMNRQKEILDTGVLEGNPILDAGLQGQARHEGEQRRYRNTKGRGSADELKRKTYEVTRSVLELLEVFNANLAFESISWVEKGGPDSTQNKKFSLWNFSALPATLRWLALREIDPAVPTVSETPDFRTEHTCPKCGACRRSGQTRENADTVRNNDSLLCRKCDFNDVISPEAKAHLVTSEGVDRAEALRK

SEQ ID NO: 2132 - protein, 597 aa, synthetic construct
  REGION 1..597: note = Synthetic
QEIFRVREAGLHFNLKDARSRVVRQYLRLLTTLVGRAEKEACELIKEGLSLERNEAGELTRVELVIRAASSQDVIGAQQILARKEEASNGSDEKTDGSGSLSPLQKAMPKYNNSYHLVKVFQADGQTWFHFILFESYLYQVDRGPRSGQTIRSKATIDSLCFQRLVTRFVRPPLFEQIPSANKGGCAQEVVQQILSHLGLIESDCQSSVGSPALEGCDPKTVVRRNREARDDLSLVEELAMTTARKLRRGRFAASDPAGDELVPSDPRWQKGLYPVRVKRQPQRLVNRIDISIHLRRWNEHGRARVGLYLALPLPTTRALKPDSPLWRFITQAENERFNFFWWHPRCDEFRPLPPWQDKSLTDRKRALVIPITVPGISSFRRLQKCSGDLSSPQHSPFIRSLCDPNWQVCWSLIVERAGEFCLQVVLKRQVETESKPNLLAVHPAVVETVDGWRTILFWSLLTGVKLASADQIEVDFLPRDGRWPDQKNRRRLSYAASRLIVRMAHELNADLAVDEVGGVKKRGPDSMNNAIATRFTYSLLSRLIEDKALELEPPVRVITVSSFHLKDDRDRSHLEQTVLLGQAGLKIKQRLDQRMT

SEQ ID NO: 2133 - protein, 582 aa, synthetic construct
  REGION 1..582: note = Synthetic
SLQKSAVEGVLLHLTASHRVALEMLEKSVSQTVAVTMEAAQQRLVIVLEDDPTKATSRKRVISADLQFTREEFGSLPNWAQKLASTCPEIATKYADKHINSIRIAWGVAKESTNGDAVEQKLQWQIRLLDVTMFLQQLVLQLADKALLEQIPSSIRGGIGQEVAQQVTSHIQLLDSGTVLKAELPTISDRNSELARKQWEDAIQTVCTYALPFSRERARILDPGKYAAEDPRGDRLINIDPMWARVLKGPTVKSLPLLFVSGSSIRIVKLTLPRKHAAGHKHTFTATYLVLPVSREWINSLPGTVQEKVQWWKKPDVLATQELLVGKGALKKSANTLVIPISAGKKRFFNHILPALQRGFPLQWQRIVGRSYRRPATHRKWFAQLTIGYTNPSSLPEMALGIHFGMKDILWWALADKQGNILKDGSIPGNSILDFSLQEKGKIERQQKAGKNVAGKKYGKSLLNATYRVVNGVLEFSKGISAEHASQPIGLGLETIRFVDKASGSSPVNARHSNWNYGQLSGIFANKAGPAGFSVTEITLKKAQRDLSDAEQARVLAIEATKRFASRIKRLATKRKDDTLFV

SEQ ID NO: 2134 - protein, 697 aa, synthetic construct
  REGION 1..697: note = Synthetic
QDEVAGTTYLVMECGLGGQDGLPAWKQAVLDKASLMVSVALAATMQALCRAFTIVVRSQDTGETMEVSWPWQAPAGSWVVDSAVLTFPVGEKQARQAKDLLSQETKPYGYRNAYRIVSLNGCTLTVEIARLMWRATREGADGKKESVMRRTETELTAATGDWNARDTKVQRQFSPIDAKTGLQALINSYLQPPELMALPSTLRPGVCQEAAQQVMSCVGLVNSPRVREPVTFPTVANRDPAVHRAAWEAAVSDMVSDLRPLARRPKREVFPGEYAADDPAGDRLVIVDPRWSAVMASRPPKPMPIRFVSADAVRVVWGHADFPIDVSKPDRHRGTLRESLQVRADRLRPQGMGDESTPRSERQRRRHNRRVNALAAKSATRALAFYARLPLLDAPELLAIADGRQGSAGSRGRGLDFNLMPMALHDAGTSAKERKGDMPVLLRFSREQLAVFFRDDIRIAWSNLVRKNGEWRLQLTLEVSYPKRTEFRRVLGVTFGLNHIATWILMDNSGAVLETGAFSPNEQLRAFLQEKGTMERDQKDGRWVGDHGFARRLEGVAHRVANQLVELALTHKAVLAIHDIDWVDKRGGESPENLVFSAWNYGQLRRYLEYKGKVAGLGPPFFAHDFAVKYACHACGACRKAGQKPENATTWVHWPDRTFHCTKCGAETALTGQLMAERAARLSLPYHQKLWAKEAGR

SEQ ID NO: 2135 - protein, 1141 aa, synthetic construct
  REGION 1..1141: note = Synthetic
EHPTTITLTISLKLRTSRFKENMLKVAQQRVTNMKSEVLASLQLDLEQINNGATSERFIGAVLALCNADNSLSPPLRQALEAMVVQLDPLALPIALIKAVATAEASESGYARQLRDYLDRWLKAHPDKHLENTLERAKNAKRRIEEHKYEPRYTPEQLTWIRYAILLRKVLQDEHTAQLQARRIVTLAELAELSHQDTVQAQKIDAAIAKRSAGQSTESLITIICASAERLASANSSDEAQALRDTLTALAKKLASRQRSARQKKAQAATLPRPFIRELIGMLALAPEIESDQGGIRWLRQQLEHWYAGREKAQRELLQQKWQGEHAPETARRIRYGVLLNAYMEGTCVLSTDILILAELTEATIREMGDGLQLLFGVLSRCYGETCSRFKYPLASVLRQATFSKCAEGILGWSQLVIDYKLVWDRRIPGNQLPAQKPREEQTFCRKNFFLSLVRRKRVTALPYIYRIWRLQEAVYQQHLATEVPIGPDAGKTLGNSEPAPRGVQRSKGWRQSRVRGERVVGKRGARRIKRWLLKEEVVAKTLGHLEVLEYPDLFSQERQDEAKIAPHPYWTAKRQQRRSVKAVRPAQFRDQASKKPVRLGQLTKRQRFFLRIQLRELKAYATQFAAIEREIDEFLEAAPPRFPSVAPVVFSEHEVRRLPFEAQLPLPELQEDRRRAYEQDLELLRDFRPSRGGPFDSYTEERLYDVEALRAQSLEQSAASLLPTKLQPIAFHRTMSAELDPKSFTLLVFWHKRPDQAEVDERYIFACELAGDDAPERAELLQRARAELKEPREFINYPERYIEGHEGSTLLFFAVEIGDKYQGHILRELYKRQKHAPKVCKPGCPYKETQTGEHLPECDPAAAIGTATITSKVNGHGHDEWFAQLTMPIPTPPCDIVPTGVIGLHEHEGQFFFAVVNYAGQLLDIGEIAVPKHVGPQTRKGKTSKNFAFEIAWQIIRQSQTQRYLAGIAIEDTGWKRKANNTSAEQNRQRFAFPREQIMSLTALKAAQSGMLPPVPIKGVAPTRDCGRCGHQLERSGVRLRNNRRCPHCALLGKPAILEPVETQESMSYQCPSCQRIWEPKISQFKCTKCGRQQYAPYNAAIAVARAMLAQLNDSTDSTDVEHIEASSVDAEDAEAIDEP

SEQ ID NO: 2136 - protein, 1102 aa, synthetic construct
  REGION 1..1102: note = Synthetic
THPVTVTRTITLKLRTTRFKENMLRIAQQRVTMMTAEVLTLFQQDLAQVSCGQAGAQLPAALASLLDMGGRSLSPSEHHELEQFIAASACTIDPQHAPRALMSALAEASAHAGTAVEHVRAYLDDWDAAHGDLNLKNTLERVATMKNRDGTPRYSLRQLDQIRYAILLRKAMAEAHAVQVRAARMAALAEQAEQQRKDEERVRLIESDLRRRGAGKSSAQLITVLCAIARRYGDPQVADMQPSLLAELQRLAKEGNKKAHAPQLPFIRTVIHRLAASDEASGAGEGMGWLRRQVEYWYAHLPLDQQREIFGDAYVSVDGALRYAALLHALLQQFSMVSTATLLLLELTEAEIRQLGDGHEQFVALLSRCYSEHCSLHKYPLSGPLRQAIFASCGQSVLAWAQKLIDHHQKAQERHITLKAPKLDGAPSFQSVNLFYRKRLIYLPLIYQIWSASMDAYDLAASTTVPFGPDSGKTLGLTRRQRQQRRMRGNQRKSVLGDRFVGKRGARRLKRWMLAPKVVSEILEHLEVLEYPDIPGVSEQQRIAAKAAVHPYWVKKQHQPHGVRAVRPTQFRSQPTAHPVRLGQLSASQRFQLRQQMRELQAFAPEFERIREAIDLFLSPAPPDFPSLDTVMMTADEAAQLPLEVRDSVDQYEPRLTAYHQSLDLLRTFWPRRGSPSGNYTAEKLYDLETLRAQQFAQHAAELQERQLQPIRFQRTMNSQYSPASFTLVWRGPEAGGDAQESVLLACALAGEEAPERALLAQRGSQAEQQEEGVVQEFLNYPGHAFSRDRVPEMLFFPAEYGHGYQAQILRGVRERQRHAPIICQRGCTAAETGQHLPGCAPAAALATATLTSDVDAFGRALWFAHLPVEIPTPACAEQPNAIMGVHEDGGQLWFAVIDLHGAVLDVGELVPPAHVGPETAHGQASENFAYEMAWKILRQSHTDAYTAWIALEETGWKRDRVDINAAANRGRFAFPREKIASIVRYNAASEGMLPPTSMRGISPTSDCGHCGQRMEQGEVRYRAVYECPRCAALDVPNTLRRSDGEDAYRCTSCGSVWSEKIPQFKCLRCGAQQYARYNTALAVARRALERLSSQGASTAEE

SEQ ID NO: 2137 - protein, 1085 aa, synthetic construct
  REGION 1..1085: note = Synthetic
EHPEFVYLTLIMKLRTSRWKEALLHITQVRYTAMKSAVLQQFQRDLKDISGGHTDQRLLDAIIALVQASTPDALMVAGCREVLSHLQRMFSGVMLLRGVMLALTQPDADGYAAMHGLREALDAWSQAHPDKHLVKTLEGLRNARSGIKKAADGTIIDEGQARFTPEYVERLRRFILLRKRLSEQMIAGLRFQRLLELITTWAQESDAARKQALEAMIVRRSEERTNQLCIALLTQRLATCGGAQKAEALERTLLEILAQERARLRRQPAPSGRRIPLLMSLVQRLSAPDLNDDRDLLPLRAQLDLGTTSVQLPEVAAALAQWMQPQLHTSTAVLVLLELGEAADRGLTDGATNMFNTLSRCYSEYCSTYEFPLSAALRSSIFQDSAEAIMSWAGKLAAYRIDRLKDLGCFPLQLGTGKRTQAAFFNDPYRIRRLMLLPVLYRYWRDEDRIYRAAAATEMPMGPDAGKAFGNPDAPRRRQKRKLQTRRQTSSLTEQFVGKRGVRRLQSWLLPEEVITETLEHLDVLLYPRNNTNERIRLAEQAPHPFWKNRKRKRRIEGFRPSQDRRSQYGTRVALVSLSKEQWLMLRNQLFELKRYHTQFAAIQVQVQRFLEDAPPSFPEVREMSIDPEWLRSLPEEATSTLLSDYAERYAHYRRTLLRLRDFRPARGTEDEDLTPERLFDIETLAAHEFLQAAARLHPVVGQPISYSRTMGVNYDALSFALLNYEQPRAWGGTNTRYTLACAFCGEEAPERALLKREDISQRAEQRMFVNAPSQPFLPSRSVDAVLMYFALQFGAKHQARQLLETLWLQRRREATNAGAQMTAAVTQASLTLGRDVDGYRAWFAHIPVPIQAAEVKRQPEVAMGLHEHRGEYFFATIDFSGQVRDVGKIDLPPYFTGESGMQSEHYPFVLAKMIVKQADQAQQSAFIGIENTDWKRTETGLDRAENRLAFAHPRQRIIEVLTYKAAIEGLLRPTVVRNVAPSRDCGQCGRRMDGSAIQLAPTRHCFHCATLGRPHALRQVGQGRNQTLCCTVCGQIWSTRELVFRCSQCRSHQHARVNTALVVARKLLEQITDQRREEEAEVSP

SEQ ID NO: 2138 - protein, 761 aa, synthetic construct
  REGION 1..761: note = Synthetic
RMKKAVLNELEEDWTAARKERGALYHIHAALKDIRDGVKRGSNIQVLSDHLSREFTKKPGFTLKDFPLTGAMRADLFHEVAINIWNWRQSFLDRPARLAKDDRKSKMAEATTNLMPLTTDDDEFQYWAEQWNHYTQQAAVLMPFGRNRGKSLGLTGKRSVRWLRERLLPEATAKKILDAVRVLLAPKGSHTRAQMITAGRVQLPYRRFHRNAERPITSRRRPRGNLLAQYEPYAASSGAPLSAFGRPEWKIIEREMCEQVEYAPKFREISAAVDLFLSERPPPFPVGRVKLSTSERAVNEKLHYQALRSLARPIHGDIEASEELLLRWEDDTKAKLLRAEGQLLDEFLQPLSYSRSMRPSGSSSYTAGGVLFDERTHQFVLALQVPGEKAPQVDGFLRFANFPESHFRPSERQSILLFPLATGQDYHNAIFSGAVSTARAAQLTLAATPEHRSQRLAEVLPTDVPFGPVTVSTQVAERGHIKLFAHIPIHVSVSPSCELPTTFMGVHESDEGRYSYVIVALAEQRRENGRLVHAGETITQGDIQLKAWADPLQAKGLQPRKTGERKQSNAPPPNNYVFEVATALVDVAQQHNAMIGLEDTGWKKAQASTQASLNHRTYSRPSRRIAEIVHYKALLAGLPTVRDVGNVSPVNDCGQCGVRLRSGVSRNQSSQRTHCPSCKGDVSPWTDGWCYCPCCRATWPSRERWFHCEQCHTHVPTRQNLALVVARQGLQQMMEHHTRWKIKKLVSGPGAEAPDGPAPAC

SEQ ID NO: 2139 - protein, 802 aa, synthetic construct
  REGION 1..802: note = Synthetic
MRWKPVILTFEWKIRKPSTLKSGRLIRTASFVTNLKSSILEHYKEDYLHPRSDGAIALVLSVRGSGSNRSNLIGARIYSEFVAQQLKDHRFSARIFDGACRAAATMMILWVQNVAAFVERREAREPVENQRRRPSDALDGLTIEALYASWRRQAELYERASETIIPFGRHKGARLDEIGRREARWLISHMLPKADLEQTLTYINQLLARDRDLTDDALFVAHPYKTDDRHKRALQARRLIQRVIDPPSGAEPTLLGLLQTDELTALRDELQEQIKTGAVLDHPLALPEFQETLAETIAASAELETLQDAFETFLYGKPMNFPLIALVNPEGGYPIQAVADYQSSLKWFRPNPDRLGDAEKYADERLEARAREHLERASGRLRTPKLQPLPFIGTIKPSTGGKATRFRDCALLFDEETGEYVFIAMLRGQDDPLSNEEIAQRKALPQNAERWGKLRYANFPLNSFQMPERVAIEIYPLEWGETSARSRFLRKRAPMLKALIEHQRQAQEALFNAARAAGQSDAEALAESLAIKSVITTAKIVTRTNSVGKQDFFVQLTVRFPDAQRLDPSTSVIGIHEYRDGYSYAVIGMDGQPLRSSDGVEQVGDILIPCHVDPTLSARKSKNYGHEVANAILRQAEGAFVGIEDTGYRKEKGELSRERNREVFQRPSKLILAFLDYKARRIGLPAPLLVRNISPSRDCSACSVRLPKGTSGVKAEHLATCPNCSRICHIDQEETEVYCPSCQFIWHPGRWDKVIKRSFNCPSCLAPARPARHNTAIIVAQETLRKLRDRAGQKQEESQADN

SEQ ID NO: 2140 - protein, 551 aa, synthetic construct
  REGION 1..551: note = Synthetic
LDILSLAHLLAGGKDLAKNKKVGVQHLTMKSAAVIDSRRESNYPVYKSAKRMHLIDLTRHKMAAIERTLVVAKRAAQYCLDRFQPEQQTLWELVMETKTFRGPLIGVSAPANGVDDLAKEEIISKLTEGEFEMAEISIEIPKMREGKPVVRVVSHLSVVLKLRSDAPLNQFQLPWVIKDGIYNKVADLLTGYAERMLDPHLAEKTTYPKVGENWPLVYQLNQSFKYFEHSETRKIYLYLPLFGPETGESLSSHAHSDTGPQLVRFGTDKVNDMKLLKRGILIPLQLDKHAETTFVRDHRHLPGWRERNATASARPRHQRYLGQLEVVKDFLPKRLEVFVRGNRLVFNVACEIPTKPPFESVDHVMGVAFGLEDLITVVVLDLDGKVIATHSVEAEPYEQIYFLRLAELKAGGGEFRQELAAFIQQRLIVPIGLAVEYRCQVGILEIGTPDKSRYSPTFNRRMSCWPYGKCGTILEYKLKGEGAPEPDHWYASLANGRCSHCGATNQKGQPNIISINKSVVTCASCHKESPAGLNAARNCAHFSLERLRKKK

SEQ ID NO: 2141 - protein, 485 aa, synthetic construct
  REGION 1..485: note = Synthetic
AEENTLHLTLAMSLPLNDLPENRTRSELWRRQWLPQKKLSLLLGVNQSVRKAAADCLRWFEPYQELLWWEPTDPDGKKLLDKEGRPIKRTAGHMRVLRKLEEIAPFRGYQLGSAVKNGLRHKVADLLLSYAKRKLDPQFTDKTSYPSIGDQFPIVWTGAFVCYEQSITGQLYLYLPLFPRGSHQEDITNNYDPDRGPALQVFGEKEIARLSRSTSGLLLPLQFDKWGEATFIRGENNPPTWKATHRRSDKKWLSEVLLREKDFQPKRVELLVRNGRIFVNVACEIPTKPLLEVENFMGVSFGLEHLVTVVVINRDGNVVHQRQEPARRYEKTYFARLERLRRRGGPFSQELETFHYRQVAQIVEEALRFKSVPAVEQVGNIPKGRYNPRLNLRLSYWPFGKLADLTSYKAVKEGLPKPYSVYSATAKMLCSTCGAANKEGDQPISLKGPTVYCGNCGTRHNTGFNTALNLARRAQELFVKGVVAR

SEQ ID NO: 2142 - protein, 413 aa, synthetic construct
  REGION 1..413: note = Synthetic
FISMEVTFEVPVSSPTVKKESFLESISKKFPKMVQWFLTVFEKEGLDFREMNMNRARKVVKELCYPTRKRSSKYNCKGAVRFPHSHYYDTAITEAIQKWNSFLTWKEKTGTDKRFPCIKNYAPSLDSQMFDLDLENGWITINTGRGEKNVHIPITVPNKSHYKKLDEEKISSIRLKRKKTCFVFLLIQKSSSPVASSPSDLGERPVLGIDLGERNLASLVAIRPSSQQTEIIEADFFDGARAKEIEHKENGIRTKLQEEGKSSEIPKRGEKSSNWKKDLCEKIACEIKEIAERLEAIAVFIGDLKAPRPRNYGTLSRRLNNYPFSRLKNAIKRHLEKADIFVELIYEGKTREEDLGTSQKCHKCGSRGERHKGGFSCPDCGLGDYNDDLNASINIAERGTKLLGKSEELGAVP

SEQ ID NO: 2143 - protein, 409 aa, synthetic construct
  REGION 1..409: note = Synthetic
MRITFEVPVSSPTRKKESFLESVSDKFPKMVLWFLTVFEMEGLDFRGTSLNRARKVVKELCYPAGERDSKYDCKGAVRFPHSHYYDTAITEAIQKWNSFLSWREKSGTGKRVPEIKAYAPVLDALMFELDLENGWITLKTGRGEKNVHVPITVPNKSHYEDLNEEKISSIRLKKKDDRFVFLLAQKSFSPKKPSPNELGEGPVIGIDLGERNLASLVAVRLGSQRPEIVNVKFFGGKEAKKLEHREQHVRKRLQERGKSGEVPGRGRKANDKKKDTCEKIAREIRETAEELGVGAAFIGDLKAPRPKNFGSLSRRLGNYPFSRLKEAIERHLGKAGIFVKLVYEGRTEDDLGTSQKCHRCGSEGERYRNRFTCSSCGLEDYNADLNASMNIAERGMKLLGRTEGLGAVP

SEQ ID NO: 2144 - protein, 425 aa, synthetic construct
  REGION 1..425: note = Synthetic
EIKIAYQVPVSSRITRRKKTILEDIINRFPKMVQWLLTIYYKEDMSFSEKSITHSRKLVKELAYPTKSHGTPYNCKRAVYGHHSHFYDTAITESIQKWSSFSTWKEKRKKAGKETGKQFPDIESYAPLFDSTMFSLDLENEWVILHTERGKENIYIPITVPNKKRYKNLEQEKIKSLRLKRNKNDELVFIFNQTVMCSSFSPSSSSSPEGDNPSPLALVGMDLGERFLASSVTITPRNQLSKIEIQRVRFHDSSELRETNRKEMEIRKNLQNKGLGSEIPKMSWSYQNKKQERVREIVDEETKWIQKLIENNREVYVFVGDLSTPTPPNRGSLSRRLNSFPYRELKNQLKHRLKREGAHVHLVNEYNTSKTCPSCGSTDTDRVNQARFKCLSCGYRANADYVGAWNIVGRGISQLSIPELEGAVP

SEQ ID NO: 2145 - protein, 231 aa, synthetic construct
  REGION 1..231: note = Synthetic
MFELDLDSEWVTLKTKRGEENIHIPIKIPNKSYYERLDEDKITSIRLCKRDDQFTFHLMQKIGGRGSPAQNNQDSGVYALTIDLGERHLATEASVKITPNGETSGKPVQRVGFHDDSHGKRQAYREHHIRRKMQNQGKSSTILRHNWRAKNVRRERVQQITNRIAKRVEQAQVEGLETLAFVGNLHTPIPKNRGSLSRRLNSFPRAELRDTLIYKLAKLGVRVEMIPWHGV

SEQ ID NO: 2146 - protein, 640 aa, synthetic construct
  REGION 1..640: note = Synthetic
AIVIRTYHMGVKFHGSKEDKRIQEIEANQRIKGLQVQQEDIAFNRLAKKTAMDLARKYPRAEAKRVPSEISKTTKNSRNITKSAYYWLFVAAKGAYDREKKVADFFNYLLQNQDQALEWAIFGRSPRAELYFTKKWKASRLYVINLINRTRRQIDKFCPPQLKFNTKLPLLTQKEIEGAIQKCNKYMSMQLTTPDMTNQAQTFVNTLRLLAINTSIVAPHLTAWNNLEHTSRWRSIRLLNKTIAEAIGKPHRVLFSALRTIIVFALFPDIGKTAIKLIKSTRPEEVVNPPFHKKKKGRIPIILLMKDRLVVMRPGNSEHMTFLAKANGEFDIGFLLKDHPRITATLVISKKVLRYLANGARIRVLYIRSSPAPSYKVRVAVVLEGPVEVFLSTKLTKQFAKRMRPPKEDEIGLDVNRIGKHMLALSNGVKLAKEFDLLIEKYQELTKKTIPEMHHNLTMKGQKKKSNAYIKAKGELARIYQRKFRIKKEIFNMIPHFLASVMIKSKCKTFFVEDLEIDQRGRKGALAIAISSMPKNMQMIEKAVQLASNVLGYEVKLVKVDARGTSRKHNICGGTIERTLKRYDRAKCRKCGKTIDTHINSAKNVRDKGVELLRLKTHPSTHTRGMGSNQASESEQSAEV

SEQ ID NO: 2147 - protein, 633 aa, synthetic construct
  REGION 1..633: note = Synthetic
MGVRFHGSKETRRLLEIEANSRIARLQTEQEDFIFDDNAHEIALSIVNQKLDIPPKFAPREIQKSTKKYSNIADSAYYWLYLASKSTAIREEKVKKMLSLFKIWGYQAVEWILFGRSPRVEKRLYLDWQVRRIFVINLLHSTRRKFDKICPKELKLSSKIPTISEKELEQNIKRCSTSITKEIVSSQQQITDKSYAFMDKLHLLEQNSKITASLLHKWITEVTSSRWKSLKNCANSLSEVLGKPKGSLFSAMRTIVAFALYPKIGQTVSKVISQVLLEEIVPKPFERKRKGKLPIILLMKKNYVVVRPGNSAEMTNLAKIHGRFQIGFTQQGKKRINGTLIFPKRVQTMLKQGAKIKVLQIRSGCAPNYKLNVSVTLEGSPWVFFGLTNVKSLGEKIKCPSNLVIGLDINRLGKYTVALSNEVPLPKIILKLINRYHLLTRKIIPDLNRSLKFSGKRKDNLSYTKLKGELSRVYRRRSNILREIKHQITCFIASTIVRSNCKALCVEDLEFNPIGLKGALAKIFFSFPDEINIYEKAISLASYFLGYKVQLIPVNPSNTSKYHYNCGGRIERTNRFYDNAKCEKCNEMVNTHINAARNIKDKGIKKLSELQSLSAYEGKDFSLQASQLTYSND

SEQ ID NO: 2148 - protein, 607 aa, synthetic construct
  REGION 1..607: note = Synthetic
PPVVRSYRVGLHFKGNKPREEEKKASQYVRGHQQIVQDKIIDNNLVDLAYDLLDTNPDFSGNMGAAHLAAKSGDRSNIGQVSSTYAIAAVNGAIDREHKLEYLFKLFEEHPKEAISWMVFLRTPFLESSLSKILDVKFDYTRNLVYSASKNMISAFADIIVPQLSENNLSKALDEVIIEVEQRIVEMKGEGKSVKKSQTFLNKLYFLRKNFDFLNMCLFHWLTYEISNPGNSRWKSLKKLSNEFSLMLGYKYRKYLFSAIRSVVVHALSFHLDETVKKLCETVSSRDLVAKPYKKQRKQLAPVNLIMGYKFVVIRPGNGEDMTRLALRDKKFSIGIRNPENGRLIINAEIRIHKRLYRMLERGAKITSLSIRSGDAPAHKILVNINLEGKKKAFITTRFLKNYENLGLKKDDIIGLDVNRLGPHILAFSQEFKLPKILLTLCERYRKLGGDISRLSAIISRNDTIKNRGELNRVYNRRKNILKSIKEECKLLSAAVLVQTNAKDFNVEDLNFSARGKRGALAKAILSMPDEIDIFRKSTELASIYTNKKVKLNTINPYKTSSQHYNCGGKLKREKGNWDICLCTKCDIEVNTHRNAALHIRDGGVMV

SEQ ID NO: 2149 - protein, 625 aa, synthetic construct
  REGION 1..625: note = Synthetic
AKVMRNYQVVLKCADQSQREEINQRIRILEERQTTLLTPYVVKKAIDLYQSNPKEKFFVRKLGKAVGMNPNIAESAFHWLQIAVKGKIDKEKKVQGMFNFLLKNPQQLIEWVIFGRSPYTERSLENYWKLKRRYIINLLVNTRTQADSYWRKKRDNVYTSATLKLNHLLPIYTQLDVLQAIDDALFYQQHEFSVLPKLTKNQQTFLNKLKLLKKEQSTVVPFLPSWINSPQPSRWKSLKELAEQLAQVLGKPTRKLFSAVRLIVVFTLFDHYMQSVPQLIKALPVEQVVPPPFKRKKKGRLPIKLLMKKDYVITREGNSKELTNQVNKQGWTELGFPQKGKKRLNAQVHFPKKVLEYIQNGARIKVFQVSCGKAPSYKPRVDVVLEGTHDCFHSSTLLQSYLHHIPAKKTSVLGIDINRLGQYMVVFNVPAPLPPDVMVLAKSYDHLSKKVIDELNLGYLTKRKEYNTLGSCKLKGELNRVYARRSRILREITRLLPHFLAAVLVKKKCKTLKIERLTADATGTKGALAKAIYTMPDSLFIYKKAVWLASLELGYEVKLKDVPPYHTSSIHHGCKGTLSRVKGQHDFAPCSKCGQQVNTHENAALNIASLKGVILPNDLFPSTHV

SEQ ID NO: 2150 - protein, 327 aa, synthetic construct
  REGION 1..327: note = Synthetic
MKKKFVVSRQGNAQELTEQIKKQGWTEFGFPKKGKQKLTAKVYFPPKLLFYLQNGACIKVFQVKSGKAPNFKPRVDVVLEGLPSCFHSNTLLRNYLSNIPKKKEATIGIDINRLGLYMVSFNTPINLPFDLLQLIKRYNHLSKKVLPELNKGLLRKRKEYDSHGYCKLKGEISRVYNRRTKILREIVQRLPHFIAAVLVKKHCRALKIERLTINPTGARGALAKAIYNMPDNKLIYKKAVWLASLELNYDVLLEEVLPYHTSSHHFGCGGMLTRQLNQHDFVPCKKCGQQVNTHENAARNIASLPGKLLTLDPFPSSHVQGNHLNDG

SEQ ID NO: 2151 - protein, 634 aa, synthetic construct
  REGION 1..634: note = Synthetic
ALRTYTTGLSLKHFPQNERRSVKRRLAAIVLQLSDENTKHCQKHAHEVVNYLIDQDIDNHCVMDPVAEVNGGKGKYGVNELMKKIGNAKNHLHSGYHQLLTSCKGYIDRVNKVREIFEFMNDNQKEFISWILWQRSTYANRVFAKKWNVKFWYVDNLMRGVHNSYFGNIKNNLPCFVRDPSEKEFIDAIDVILSGFNNDLTNREKAFVNKLKKLKKLKTIGLTGPMDPMELSFIPTGWKHLKMWVDNLDLHRSWMPVFRSILSQVYLLDYKGMINKIKTAKVTELLRIPFQKDERKNNKNNKNNKNTKNNKDKKNYKNKLSYQMVSGPKYVIRRENNTKSLDLMRKQGYFVLQFKFLEDKWKDAIAVRVKPSRKMRVIIYKEITLRSMVVHTPRSNDVDIQLIFEGDTENFISTDHLKKKISVNKVDTIGIDINRRGEYAVVSNLDVELPDEIVEQSRRWNVVLDKISHLQYLQDKTDNSWRKSIYGFQIGDLHNRKKNLRKDYHLRLANWVGLQMVSSGADKLVIEDLDIRTYGTRGALAKAIESMADDTSLYAREVLAVRKFTGKYIELVKTSAYNSSRIHVDCGGRLKRDYSRNQYDIAPCSECGKMVNTHKNAAIYLVSTLSGPQNPDIL

SEQ ID NO: 2152 - protein, 380 aa, synthetic construct
  REGION 1..380: note = Synthetic
SAEFARHLQWWLQQASSGNDCWKLTKELSKRLGIHSKDGLFLRLLKHYLAYLLLRPSVPEFRAGDLITTPVYKRTTIWLVMGSKYVIRRPGDASTMRQMILDGKDIELHFGYKYKIPVKGLLKVHHKMRQILKTGDLRCIALSINPKNNLIRAQLIVDRTDFRIKLRKLKVPRAKVVGIDLNKIGKHIVAFSIPYTDPELNKLCAKYWQYKNLIRELQSKLDRQRCPNPRLHEQIRQLHRKRKDIRRAIHNMLVPLIASVVASSGAETLVMERLHMKPHGLKKGLAEAVNSMPKTGLQLRLQQALPNVEIVSIDPWKPAFKIHANCGGKLDRKKNWHYPPCSKCKIEVNSHENAAKMLVKYHLSSSTIQQFLSSLTGRKP

SEQ ID NO: 2153 - protein, 565 aa, synthetic construct
  REGION 1..565: note = Synthetic
VPEYLTFDVGVKFQSIEDKKAFTRRVREVMEDCMKMANDPEVQLELYDFLVKVKQEGKLRCSRMQRNAFIEHLYHNGFAHYNPYAMYHRSTVTILLQAIKTQLTFKSYIEIHKAKKPGAFAEFLIFGYSNTIAWDICNREGVSWKWVKDFLIGVGRKLKKPELNFNYDPHGFDISLRLWFRSLKKGKKKFQKEYYARAETMIQNPRKVFSLVKKFIEKYGKPSENKDILLNILKGNYPDRYVSNFSSLIGHLFQNVNCSLPNFIVEFSNMPILFSWGGKAAYFYHEPKITDKIKMGLPIILKTPYAKRKRKMAVVELKIREYIRDLVKRGAEFSHFILSLRRSGNLRVQVVLKDSPVPIARPIPIQVKKTDIIGVDLNRMGKYMVSCNVELPIEITQEFERLGKKYEVYLEEISHLHPLHPNRKILYGKQKEIRKVAHKFAARVIASLVLAADAKILVTERLKGISTKGKRGKLAKAIMSMGKDKVIMDAVAILKGWGKQIILIQALPWNVKFSTHHQCGGNLIRKRLWNVVPCDRCNTMVNTHENAAKLLADYGKNKCEKQHQA

SEQ ID NO: 2154 - protein, 564 aa, synthetic construct
  REGION 1..564: note = Synthetic
SGQTATYRVHYKIPDEVSDRKEFRTRLANKIRDLKELSLAMANHPRVLEGMEKYVLQSPRFSLNKFRKTFLNPYKNEFAQVKVKLSTGKEMPLYVGSNLHESTFAYVHGAFKAREVLKRLFLKVVKDCEIMFSLFGRDPFMGLKLRKMKYTKAFAYNFVVGLGRKLDQPIPQFRVEPKVIRQWYDDLFEPKTDNQKKFHERAQVMVDNPGKVIAVLTDFFKDCGLPSDNWELLKSTLSHRFPKVYASPFRHLICYIAVKHGFQPQFDLDKLFPRPEFNDLPIQLVMSKKYVIKRPGNSSEMTELVCKGKSIDLIFPNKGKPLEVTIKFPKAVVRRICAGAVLSSFRVDLDRDGQPRIDVILRKVPSPWSTKLWKMELEKTRVVALDINRLGEHMLSFNQPTDNSVFKELNRKYQAVSDQIKQYKSSDHWQLGQLHRRRSNLLKTAHSLVPRFIASVIVNSGAEVLVTEFLTVTTRKTKGSLAKAITTMPQKEELIAKALAICRKLGHAVEHRIVNPRHVNFKVHFGCGGRLDRGPGQWDYAPCKRCGEKVNTHQNAAELLAARS

SEQ ID NO: 2155 - protein, 892 aa, synthetic construct
  REGION 1..892: note = Synthetic
TKVLRTYKVGLRVPESLLTPQNRLIRIREILQFFRKIHMNQLKSEISSNFNGFIRYKHLEGANSDVRKIYKCEYEKYKDFTLREIFQELALNKKEINKLRWRNKTLNSRLFKTSDVPRFSDASQPVPKDISLYDYQSLANRSFKMVCKYLNMLAHHFISKVPADSQLLIEQALSNAQKKEKKITRSSLVSYPEMAIANVLGRYGNLDQIAFSQMADALKAHNDTTTKLEYVRKLLFPENGSDPDFSEIVPALLAYYSVPNYLKRYLAKVWNVDASWVRNMIVGWRRTIDSFLPLKFQIERLSGVFTKLANFCMKYASTEDEIKIIKRLQKHKLLHLLSKVDLRALLPRELHESYMQLVIKVPSYPSALKRLIGSSTFKISPQNVEQSIHSLMNHVQENMSNLDSQSRGYDNCKIFLNKLTFLKSIVCLPLFTLLFENFIPGNQFTHAAGKLLLYNNFAHHSRLKRLFTALRSIAALTLARMIPSAIAQFKKALIPENCVRKPFTSLKRKRKHLPAPLLSPKYVIERKAHPLNPSFINNEHTTELFKKEKCIWLGLPIYSPDQDTQFVELIKGTRKNVRKKGTFWFELRPSRKIIECVQKGAQVQLIRLNVPRGPTNKIVVDVTLAAHDRKAFAHCGNFLHAWDIQFGTLWFPKDQFLGSDFNQIGSHLVAVGTPDLEIDLTAGANMMEFYEKAYKKLEIYRKCELPHLQTNLATKRYSKKEVGRRTAQITLLHRKRMNLMSEMKRNALMVYLYAGYRTKAQYFVWDSAQGISTRGTRGTLATAITYMPNRKHLFDEFVIWAQDLKEQGLLPHYQLTEPVSPFTSRVCAECFQKTGKMRRSLKPNTSYHNVTCSICGWKGDRHSNSARVSALLLQNRLYVHTTDPVSAIDGLG

SEQ ID NO: 2156 - protein, 881 aa, synthetic construct
  REGION 1..881: note = Synthetic
ERRTYTTSLRAPATLVGGISKLVAEREVLRYLEVQPGGTFDGFCRRKPGLERAAVAVGTLYRGFIETWHHCNAGEIGAALDANTRAIATLKSQAPAVSGKVGFARDTIAAVSGTAAPDPAGISLHDYHRLAGESLKMTCAHLDSIAREVAPLLPASMDELVAAASRNAASNGNAISEGSLRTYPEKAIAHYLGRHGNVELTAFEQVAAMMEVYRDARAKVEFVKGLLANGDGSHDFSGVVPALLYTCTVPRHFVLYLARAWNVEPGWVRNTLVGWRRKVDGLLPASCQVESLPAAFGVLADRARTLAGDDAAQLEVIGILERHRVLHLLHRDVDLSPLLGTALRGAFEQLRAKVKGCKEWHAEASLRIGSHETCFSTETLAAAAASLSRVVAATMASFPADSAAARNCHAFIAKLDAIVETIPAIAPFFEHHVPGSRYTGAVARVLSSLNHVKRRRVSRLFTALRGIVTLAFAAAEAAAPAQFTSVFVPDNCVTRPFTSIKRKKRHLPINLLFNKYVIIRKEHPAACKHVNGTTREAFLANDEATGLLRQGKAIWLGIPIYSPDQFDASTRRLSGARKGVFWFELVPTRPVITRLERGARLETIRLHVPRGPCRKIKADLVLASDDPAAFTRGSNFIGTMNAAFAAKPFPRDDYIGVDLNALGPHAIALGTSTSTIDLRSSGDLVAPIAEAARRIHDLRVEIARVQRVIATRVASGSDAGRQQAQLTMLHDRIARLRADAERRVLMVYLYVVHRTGAKHASWDAVTVSTRGTRGTLAIAITGMPKRAGLLAEFKSWAYDLAGAGLLPRFEDVTPVSPYTGQACDECMARTGELRRTRKDGVPYHEFECASCGKKGDRHQVSARVSALLLKILIEQVTIAVT

SEQ ID NO: 2157 - protein, 707 aa, synthetic construct
  REGION 1..707: note = Synthetic
EVVVRAYANGVSFKHVPAPERRAYQVAVAQRVRELGQDVALKCQQYAPAVIDLFARWHELEAHAQLLEAESLTELMPPMLELATALKLKVTDLAPDKLLAKLRYAFTHRNPKYLAAVFAAYCRDRSNLGQASFLRLVAAGRGFLDAQDKVELLQAHFSAERDEFLSFLLFRRATWTELLLTRHYHTAYSWARNFVVGAANKFQAALQTAGVQLPEGRALTAPEVQQAVSEIVKEVQDALAEKQEAGGDVSRIQRLLNSLHLIEVNPDVITTFFEPNSTDTPLTWKRLKAYANTLRGISFSAIRKVIVRACSHRPEWQHAIERCLRLFTPEAALKRPFHERVGLNPLPIDLIMGSKYVIYRPGNAAQLQALLLREGRIWFEIPQVPLATGRQTVKVVWVAQKSVLRALKNGAKVKSFRFGMPQGPGKTIKVTIMLEGTESVFLGTAYLQSPPETELYSQILGEERVPPNQILGLDVNRPSEWLLTAKDDLGFGQILEQILAHWREAEETIATLQQKRERTHNWKRRRKLKAEIQLHHQRRAHLKQQLFHAARIHLGRVIQALGVTFVGVEGNLTRETRDKRGGLAKAIAGMPDHLELVARAILAVNQRYQRAVKCALVRKEGTSQVHHACGGRIDRIGDLGTCRTCGQEVNVHQNAAANVEAATERLVGQHLQLILEIFLSLNIPGGAPSTCTRPGTQPPDLPKRVKV

SEQ ID NO: 2158 - protein, 346 aa, synthetic construct
  REGION 1..346: note = Synthetic
NMLVAKTIKCQVMNLTKRKLNMLNIEWNNYQDFIELEKNDLDWLADKILIYSSYKNQARWYWNKFKKQNFPIFIPNDRLEIRETDNKFSKYWVKIPVKSKRGGIWLPIKLLGNLPNDFKLGESKIIKRNNEFYINITIRKEIEIKKSYSSILAIDIGEKVLATVLLNGKPIFMGREIRGIRRHYAWLRKRLGNKKLLKVIKRISNKEKRIVNLKLHEISKTIVGLATSTDSLIVLGNLKKIRKSAKGKRFNRIVSNMPCLKLTQYITYKANWEGIQVIKIDEKGTSKTCSKCGYEDKSNRKNQGLFICKNCGLQANADFNGVKNIEKRSLEYISKDGATLRPKILQ

SEQ ID NO: 2159 - protein, 368 aa, synthetic construct
  REGION 1..368: note = Synthetic
MKSQKIIKCKITYLTNIKAQQLETEHHNLQNLLQLEREGLDFLPIYQNIPLHSANKQQALRFYKRISTDKIYAISIRNDIIKVELKPNNKISKYWCKIPVKQRYGGIWVAIKPHKKDIDFSQYKLGESKLFKKKNEWWIYITIIREVQIKDSYSNILGIDLGSKVIATVCGSFYNQRPTFYGREVRGIRRHYQYIRTELGKKKLLKKIKQLSDKEHRIVNDLLHKISKQIVEKAEQTDSYIVLGDLKGIRNSTKNKGRNFRRIVSNMPYLKLTQFIEYKAKEKGIKIIRISEKGTSKICSKCGYEDKGNRKSQGLFKCKQCGFELNADANGARNILKFSDGYTLPERAMSELALNSNQLEKPTCFSGG

SEQ ID NO: 2160 - protein, 363 aa, synthetic construct
  REGION 1..363: note = Synthetic
MLATKSIQGKIIGLTNYKRGLLDNEYSEFNRLARWVSECNKEGIDEFAEYSFVKNKFMVYSQTKQQALRNCQYANKEQPLIICHQSIKITTNNNKLTSLWVRISVHGVKGGIWLPVKTSKEKIKLIKECKTRSIKITKEKNVYYINIIIQKEVTMKSCSNVLAVDLGERYMAVVSGTAQKQPLFLGRGVRGIRRHYAWLRKRLGEKKLLKKIKQIGQKESNKVDSILHVISKRIVEVASKTNSTIVLGDLKGIRNSTKKKGKRLNRIVANMPYFKLTEMIKYKAKWSGIEVKKVSEAYTSRTCSKCGYCDKKNRKTQGQFKCQGCGLELNADYNATKNIVKRSLGQHLSDGALAYAHKSIING

SEQ ID NO: 2161 - protein, 366 aa, synthetic construct
  REGION 1..366: note = Synthetic
MVSVRKTIRCKINNPTKLKVSMISSELDRINELMQFQSVGLEYSDLYLNLKKKVNSGNLHEAERKLKKYKHSCMPLIIRKDLIKVKKTSNKLSKYWIRIPVKAKRGGIWLPISSQPFDFESYEICESKIYRKGKDWFVNITVQKDIELSDTYTSTLAIDLGEKYMGCSVNSSDTSLKPTFYGKEVRGIRRKYSYIRNKLQKKGLIKEVKRLGNIEKRKVTDTLNKISSRIVKEALTSNSLIVLGDLKGIRNYAKGKGRRFNRIVSNMPYYQLTSMIEHKANWNGVRVLKIPEAYTSKTCSKCGSRNTSRQKQSLFKCKDCGFSLNADLNGSRNILKRSNEYILSDGVSVNMPKTELINSEAYLLQR

SEQ ID NO: 2162 - protein, 348 aa, synthetic construct
  REGION 1..348: note = Synthetic
VLIAKTICGRIEKPTKFKFQCIEHEYNGFQQWMIFGIDQGIYSTYKVGKIWKRKTINYQEYPIIMWAQWMKFEQNKSGNWLLFKTKLKRGGIWLPIKLYQPIPTDCTLKDSQLVYNHKKDLYEVRLVFSKEFKANNHKNILAIDIGEKVMATVVCGDQTGSHTKPYFFGKEIRGIRRHYSWLRKRLGERKLLKMIKKMGQNERNKVNSLLHEITKKILLLCYKHNVGYIFLGDLKDMRELAKNKGRRMRRIVSNFTYNKFREMLRYKAEWNGIQVIEVNEAYSSQNCSRCSNIGKRPYQGLFKCSVCNSEMNADYNAVKNIYKRGIDYISMLGASAYALNPSTETGSI

SEQ ID NO: 2163 - protein, 348 aa, synthetic construct
  REGION 1..348: note = Synthetic
MKITVCGGIIGLTNFKRNILDFEYNGFQKWMIFGIDEGIYSSYKAAKGWKFKKIRYKEHPIPLWSQLTKIEHNPSNTIAPYWLRFKTKLKRGGIWIGIKTKQSIPENSKLCDSFLLKNSKGNYEVRLLFEIPDVPVKESKNMLAVDFGEKRIATIVSSKDKKPVFLGREVRGIRRHYSYLRKKLGNKKLIDKVKFLGNKEKNTVNGILHKISNSIIAKSIEDKACIVLGNLKGIRNNSKGRRFNRIVSNMPYFKLTQMIMYKAQMRGIKVIKINERGTSRLCHRCNHIGIRNKQSVFQCLNCKTSFDADWNACINILNRSEELVSSDGAMAFSPKTVPLETVSTFNNL

SEQ ID NO: 2164 - protein, 354 aa, synthetic construct
  REGION 1..354: note = Synthetic
MLVTKLIKVGVIKLTNSKKECLDHEYNGFQKWMIFGEDSDILSQHKRAKGWYYDKNNIKYKEYPLVVPYNQVQFRKKETKLTPYWIKISVRKRKGVGVWLPIKPHKELLDFKYLKDSLLIKNKKGNYELRLVFQYEVPEINYNNVLAIDLGERNIATICNSSNLKPIFYGRTIRGIRRHYNYLRKQLGEKKLLKKIKSLENKEKRIIEQELHKISNNIVEEAVKTSSMIFLGDLKDIRKSAKGKGKRFNRIVSNMPYYKLTQMITYKSAQQGIKVIKIKENYTSKTCSKCNQIGKRLKQGLFKCSNCKYEVNADFNGVQNILKRSLDYMFKDGVIGSNPKISPEEINANKINCI

SEQ ID NO: 2165 - protein, 372 aa, synthetic construct
  REGION 1..372: note = Synthetic
KVKIKKTIKCKIHNLTNIKKQTLIAEYNEYQNICQEVSETINNDYLPERPFKIFKNKKRHKSFVNGAIRTIKNKKQFQNLNEQPLYLVNDSFKIIKNQTKISKYWLKLPTKQKYGGIWLPIIIPYKYENLLSEKICDSMIIKKKHDWFLLLTIKKDIPMKKSYSNILAIDLGERVMATVCGSFDNQRPTFYGRDVREIRRHYAWLRKRLGEKKAFKTIKKIGNTENRKVNDVLHKISRQIVDRAKETNSIIILGNLKGIRESAKGKGKRFSRIVHNMPHYKLSEYIKYKAGWEGIMTIAVNERGTSHTCSHCGNKGKRPYQGLFICDSCNYQVNADYNGAKNIAQRGLESISSLDGVRLTEPITLGAWQHGR

SEQ ID NO: 2166 - protein, 292 aa, synthetic construct
  REGION 1..292: note = Synthetic
LRKVRLPKHRHYPLILRRDVIRLERRDTKIVPYWLKLPVFGVRGGIWLGLKPHCDVPLDCSLREAKLIRRKNSWTVHLTIQREVPGPVIDERPILAIDLGERYLATVCGSNGINPQFLGKEVRGIRRHYGWLRKRLGERKLLSIIEKVGPTEQRKVNDICHKVSRQIVNQAKETGSVIVLGNLKGIRKKAKGRRMNRIVSGMPYYKLTQFIKYKAAWEGIPVVVISEAYTSKTCHRCGCLGSRPCQGLFLGHSCGLRYSADLNGARNILKRAGEYISSAGAALAQPVTQVRT

SEQ ID NO: 2167 - protein, 367 aa, synthetic construct
  REGION 1..367: note = Synthetic
AMRVEKTIKCRILEPTGRKRGLLIKEYSNAQGYIRRRTEDLYSATKQAMDRYVEKVQNEEYPLFLRNDTFRVEKAENTRRFDYWAKIPLAGVWGGVWVPIKPHQEIEEDMDIHDSKIVWREYGFELHLSVSFEVSNQAPESILSVDLGERVMATETVFPADNGNPRFYGREVRGMRRKYAWLRKRLQEKGLLKRVREMSDKEKRKVEDILHKISRKIVDRAEENNSLIVIGDLKGIGNKDTEKGKRMNRIVNSMPYWKLTKMIEYKAEERGIRVVRVNERSTSKTCHKCGSENTSRPTQGRFDCKTCGLENYHADLNGGKNILQRFLAYMVGNGAFVNKPITGAFMNKNKVISEQVLGSSLLTSETS

SEQ ID NO: 2168 - protein, 258 aa, synthetic construct
  REGION 1..258: note = Synthetic
MKVHDSKIVWKDYGFELHLSVSLDVSFQVPKNVLSVDLGERVMATTVSSADNGKPEFHGKQIRGVRRHYNHIRKNLQQKELTKKVNEIKDKEKRKVEDQLHKISRKIVDEASEINAVIVLGDLKGLGNKDTGKGKRMNRIANTMPYYKLTRMIEYKAKEREVQVVKVDERNTSKTCHRCGSKNTVRPSQGIFDCRSCGLRDYNADLNGAKNILYRFLAYMVRNGASVNRLITKAFIEKNDVEVSEKALGTPYLTSVSE

SEQ ID NO: 2169 - protein, 352 aa, synthetic construct
  REGION 1..352: note = Synthetic
EMKAKKVIKCKVFALTERKRRVLDAEYNGLQTYLQTGKDSGLCKTNMRQAKRFYKKILANHEYPLTIRKDLVRFQTNNCKLSKFWVSIPIGGPTRIWLPVQPHASVPEGAILCESKITRGRDGVFWVHLVVEKDVPYHTDFTNVLAVDLGERLPATTVLYANGAFKEPRFYGREVRGIRRHYAWLRKRLGEKKALNTIRKVGRTEHRKVNDACHKISHAIVEQASRERAVIVLGDLKGIRNSTKWKGRRMNRIVSNMPYYKLTQQIMYKAAWLGVPVYQISERNTSKTCHRCGSMNTTRIKQPVFECKACGLVYNADLNAAKNLAKRFHDHAVVERGILAMPVTPHEVKLNE

SEQ ID NO: 2170 - protein, 355 aa, synthetic construct
  REGION 1..355: note = Synthetic
TPMRLTIRCGIVLPTKRKLKLLDAEYQNLQLFLKGKNVPLYSANKQQALRFYQKIKMKEYPLSLRNDLIDVQKSKSFYFLKVPIHGIRDGLRLPFKPHRNIPENGKLCESKLFKKNGRFFVNLTYEIPTSLSTRFSSVLAIDLGERTPATAVLLQDGAVMKPMFLGREIRGIRRHYAWLRKRLQEKHLRKDVERIGNVESRKVNEVLHGISKRIVNAAASANSCIVLGRLHNIRKSARKKGKRFNRIVSSMPFYKLQSMIQYKAEALGIPVVFTPEDMTSKTCHICGMEGKRRTQGCFVCFRCGQYNADLNGAINIGKRLLPYMDGSGATCGLAPNCGMTTNHGLTSEATAFRRW

SEQ ID NO: 2171 - protein, 256 aa, synthetic construct
  REGION 1..256: note = Synthetic
AKPSCLVETTEDAERGESKLFRRHGRFYVNLVFTFDTPPLRRGTSVIGVDLGERIMAATVLLQNSCIKRPRFLGREVRGIRRHHAWLRRRLQERGLSRIVKRIGDREKRRVDAVLHRISKEIVEMADRTTSWIAIGDLTGIRRSAEKRGKRMRRIVSNMPFHKRTQMIIYKAMIRGIPVVLVNEAYTSITCHVCGRRGLRSTQARFRCPECGEFNADLNGAINIARKVERHLGYIPLCGPPVNQPLTVQLHRSHRF

SEQ ID NO: 2172 - protein, 351 aa, synthetic construct
  REGION 1..351: note = Synthetic
IMLVSKTLKCKVFNPTESKLQLLNDEYSNFQIYARSGKDFGIYSLTKSTFDFKHRREIRKKKQPMFLASQSTKFKITNNKLTPYWFRIPVHGKRGGIWLPIRPHENIDFSWEIREAKLLKRKKDFWVYITVRKEVQLRTSYSSVLALDIGEKVIAAAVLSSVHKPIFLGREVRGIRRHHAWLRKRLQERELFKKLKEMRGKERRGVELVLHEVSKYIVELAEKNNSIIVLGDLKGIRKQDKGKRFNRIVNSFPFNKLSFFIEYKAHLRGIMVVKMKEDYTSKTCSRCGEEGKRVNQGLFKCPHCKYQANADFNGAMNILKRSWEHVFQDGAVAFSPEPPMTEQTRAEAHNI

SEQ ID NO: 2173 - protein, 363 aa, synthetic construct
  REGION 1..363: note = Synthetic
MELRKTVRVKLGGLTLTKEAILVREYEAWLRRLRMGSTAEGPLYAATTQQADRLRKGLGHRFNRAGNYPMVLRRDCYRLEKARHTTHSGWWLKVPVSAVRGGLWLPVEMAPSYAALLAEPDVSFREAKLIHRRDHWSVHIVVDRSVPIPSLEGHPNILAVDMGERNPATAVLIAPGTTMKPLYLGREVRGVRRHHAWLRKRLQEKRAFRAIQDQKNRESRRVGAILHPAIKRLVGVAKENRATIVLGDFSGGHRNTHKGRRFNRIVNSMPFGRIRRMVLDKAEWAGVPVVLVDEAYTSQECHRCHNLGKRDRQAEFRCLSGLCGWRGNADMNGALNIGDRWERPRVLVGLGGADSTRPMNPAG

SEQ ID NO: 2174 - protein, 359 aa, synthetic construct
  REGION 1..359: note = Synthetic
MLVQKTIKAKIFGLTTTKEAMLQQEYDCWQSFLRGNQEVPLYSATKQQAGRLLRSLGRHFERSRMYPMVLRNDCIRVEKAKDTIWSKWWFKVPVANLHGGLWCPVQIPDNQASLLDEGAIRECKLIRKGDHWSVHIVIQKDVPEAFLNPSQPILAVDLGEVRPATAVLLKDGRMTAHVMATREVRGVRMHYNWLRQKLGEKKCLDTIRKIGRTERRQVDARLHKLSKDIVQLAKDNDAVIVMGDLTGIRERTKNKGRKFRAKIARMPSFRMAQFIEYKANWAGVSVFSINEAYTSRACHVCGSPGRRPHQGLFLCDNCGSQYNADLNGAINIGRRFLDQVFGNSGALDTPPNFGDVRPC

SEQ ID NO: 2175 - protein, 320 aa, synthetic construct
  REGION 1..320: note = Synthetic
MIKVKKPYSGNRKMHPEVYSKYASHASIAEPNDPVYLDTQRMFKVIKTDNKMPYFVAITVKPRLRIWCPIKTKQYIEGNIHDSKLLKRDGHYELYLTISKEVSFDNAHPSSILAVDMGERNIATAVLFANSFTSNQSKPIFMGRNVRGLRRKYAYLRKKLGKKKLLRMVRKVSNREQRKVNDILHKISRQIDDVAKENNAVILLGDLSGIRNRTRSRRFNRIIASMPFYRLTKYIAYKANWEGTPVLTTREWYSSKLCHRCGSDNTLRPHQGLFVCHACGYQCNVDYNGAFNLAKRLGKLSSLTALSGSSAKIERLFVIR

SEQ ID NO: 2176 - protein, 358 aa, synthetic construct
  REGION 1..358: note = Synthetic
TVKLVKTLRAKVHSPTRRKREALLSLHKGWQGALGLSRDYGYLREHTDLPSFYCRDIRWCVGKGNRSPVILGQGAMNLRPGGRFAPWFASIATPQGRVRVPLRLCPEHSRLLAEPDVKLGMSHLVKKGPAFFLHIVVEREVPDVPIPVNAPVLAIDIGDKTIATSVTLDPGGRVAAPPEFMGGRVRGIRRHHAWVRRGMGHRKAFRAIRRMGSAEHRRVDAELHAISRALVDRARALGAVIAIGDLSGIRENKRGRGRRMSRIVNAMPFDRLSQLIGYKSAWAGVPVLLVDESWSSRECHVCGQDGLRPTRGRFVCPACGEWNADLNGAMNIGNRALGYMSIARVPRIAPERMASSDG

SEQ ID NO: 2177 - protein, 286 aa, synthetic construct
  REGION 1..286: note = Synthetic
VNLPLRGAEGHENLLGSDVRVCNSEFIRRNGDFYIHITIQKEVSPPLMPYGRVLAVDLGERVVATSVAFDSTRWCEPHFHARSVRGVRRHYAWLRSRLQERGGFRSIASVGKSERRRVYNTLHEAAKAIVKQAESLDAVIAIGDLTGIRKRSRQKGRRLKSIVNAMPFRQLTSLVEYKAAWAGIPVLRVGAEYSSVECHTCNERGLRPSQGRFVCRSCGEYNADVNGAINIGKRALRYTREVGAYGFRPEGGPPFSRPSELAIAVSAEPICIHRPPEFPGMRVETF

SEQ ID NO: 2178 - protein, 393 aa, synthetic construct
  REGION 1..393: note = Synthetic
HLLYLLGTSEKDNTKESRTHQLPRLTIKAKVTDDSKTKLELLNREYGAFQAYVQGNTTVQLYSATKQQADRLRNRILRKQKGKINPKKQYPLILRRDLIDVQKDTKFPCVYWMKVPVYPKSIHLRIQTDCRYDLIEYNLREAKVIQQAGSWYIFLCIEKEAEQPSRPPPTNVLAIDLGVHNIAVTVNTANTRPNFYGQKLRAIRGKYFNLRRKLGQKKKAFYKIKALKNREFLQVNHELHKISKEIVEEARRTNAIIVVGKLKGIRKRIKEGGSSRRIRRLVNNFPYYRLVQYIKYKAAWLGIRVMEISEAWTSQTCHHCHEKGERKTQGFFRCKHCGLETNADYNGSMNIMQRALGILSRAGGILTIPIEPLVIADRSKVITGESHMLQRWE

SEQ ID NO: 2179 - protein, 382 aa, synthetic construct
  REGION 1..382: note = Synthetic
MLAKKTIKAKILELRKDKEELLKREYENFQRYLHGDKSVPLYSATKQQAERLLRRIKKPKKGKEYPLILRRDVYRAETKLTKYWLKIPIYGVRGGINVPIRPHTPITPNMQTREAKIIKRKGEWFVHITVQAEVQEKNPTSILAIDLGIHNIATTVNSADEKPKFYGKKLRANRGHYFYLRRNLPNHKAIKKVGSHEKRIVNHELHKISKAIVEEATENNSVIVVGKLKGIRKNHKGRRFNRKLNSFPYYKLVSFIEYKASWQGIHVLKVSEAYTSQTCSRCGTRGFRRRGFFQCPHCGLNLNADWNGAKNILKRGIGELKRQSMLGAGLTQPRTSPTVSLSPIMREESPDFSHGECQYESTINECPPNNLSEPSIENNESI

SEQ ID NO: 2180 - protein, 365 aa, synthetic construct
  REGION 1..365: note = Synthetic
MKVKKTIKAKILELRKGKEELLKREYENWQRYLRGDKTVPLYSATKQQADRLLKRLKGRLKPNKEYPMILRRDVYRANTKLTPYWLKISIYGVRGGINVPIKTHEPITEDMVCREAKIIRKGDEWFVYITVEKEVEERNPKSILAIDLGIRWMATTVNSNNPKPNFYGKELRKVKGHYFYLRRSLTLKKAYKTIKKIGLKERRVVNDILHKISRAIVNEALENDSMIVLGNLKGIRRNGKGRRFNRKLNNGFPYYRLSQFIEYKAKWLGIKVIKISEKNTSKLCHKCGEEGVRVGSSFKCPNCGYSCHADYNGAMNILKRAMGLVSVAGAGLTQPRTRYDEARRPKNRESPHLSGKSVKSYSFKF

SEQ ID NO: 2181 - protein, 363 aa, synthetic construct
  REGION 1..363: note = Synthetic
LLKLQRTIHAKLILDREGKRQAVEREYDAWQRQLHGNDEQLYSATKQQAERLKTKIRKQQEQAAKQLETKRKKQRRVRGINPLKEYPMTLRRDLVKLQEQKASVFKWWIRIPVSPKSIWVPIQLPYEQESLLKYDLRECKLLHGEDGEWYVNITMQKEARLKRKYAQILPIDMGVRKLATTIEDGKPQFYGKKVRTIRGRGYHLRRSVGKPSIIRKWKHREQRAVQHQIHTITRRIVEHAKRMNAVIVIGDLAGIRNQSKGKSFNRRLGSQPFYMFKQYLTYKAAWEGIRVLTVPEAYTSQTCSRCGVRGQRVAGRFSCQNCGLVCDADVNGAWNIAKRAHGLLAHETGGLLTVPRTLAECEP

SEQ ID NO: 2182 - protein, 344 aa, synthetic construct
  REGION 1..344: note = Synthetic
LLKLQRTIHAKLVLDRWGKREAIEREYEAWQRELRGSNEELYSATKQQAERFKRRVREQNHHGLKMREYPLILRRDCVKLQEQKSSTFRWWIRIPVHPMAVWVPMQLPYEQEPLLRRELRECKLLRVSEDWFVNITIQKDAHLKRRYTSILPVDMGVRKLATTIEDGKPRFYGKDVRRTRGNYFRLRRSAGKARIIKRWRHKEQETVRHQVHAITRRIVEQAKRAKAIIVIGDLKGIRGQDRGRSFNRRLSSQPFYLFKQLLTYKANWEGIRVLTVPEAYTSQMCHRCGVRGQRVAGRFSCSTCGLVCDADVNGAWNIAKRAHGMFHETGAVLAPPRTLAVCEP

SEQ ID NO: 2183 - protein, 385 aa, synthetic construct
  REGION 1..385: note = Synthetic
KIQTELKPSAIPHPLGVGKGRQEKNMRQQIAITGKIIGLTKIKEAMLQNEYDRFNQICRQIQECRNNDIEPQYSWFKNKDIYCSTVTNAFYIIKKQFCDLSEQPLYLRNDVSRIEKKETKFAKYWLKIPTKQRRQFWVAIKVAKEKEELLGYKFCDSKIVKRKNGWFAHITIEKEIIIKTDYKDILGIDLGIRRVASVVQLSNGVTSFYGKELRETRGHYFHLRKNLGIKKANKTIKKIADTEKRKVNDQLHKISRNIVNQALRTDSLIVLGDLKGISGKSNRGRKFNRKLNSMPFNKLSNFITYKANWAGIRVIKVNEAYTSKTCHKCKELGIRNRGLFKCECGYQDNSDRNGAINIAERGLGEASKSGAIVALPITFGGTYGK

SEQ ID NO: 2184 - protein, 364 aa, synthetic construct
  REGION 1..364: note = Synthetic
MPLAKKCYHCRVIEDLTNTKLVALEQEYNNLQHYLQTKEDLGLYSANKQQADRFYKIVKKTSRYPISIRNDLIRIEHNPNTIAEYWVRIPVKLVRGGLWIGLIKPYEPIPKDAKICECKLYKRDNRWFLDVVVEKEIPEKLQYQNVIGVDMGIRHIATSVELANDLTKFYGKNLNHVRGHYFWLRRKLGIKKAIDTVKKIGSHEKRIANDIIHNISRDIVNRAIETNALIVLGDIKHLRRRRQNTKGRKFNRKLSGFQYYKLTQYIKYKAALAGIKVIQVSERWTSQYCRKCNRKGIRKIQGLFQCKKCNVRSENADRNAAFNIAYRGLGQVSSLGVTVNIPRTFPSVDRNAMMRKEATDFNQW

SEQ ID NO: 2185 - protein, 359 aa, synthetic construct
  REGION 1..359: note = Synthetic
MKLTKTIKASVINLTKNKKELLDNDYFNYQWWMIFGIDNGLLSCFKSHKWFKQKTIKYKEYALPLWSVLIKDWFRKRETKLTKDWIKIPCSKKKGQGLWLPLKFHQELPKEFTLKDSYLTRKQDKYYIYFAVEIEIPDSYAPKNVIGIDLGLKNPVTLVNINTKETKFLGKELKQVKGKYYYLRKKLGKEKNLKQVKKIKNKEKRKINSILHKISKSIVLNAYDSKSAIVIGKLNNLKKDKGRKFNRKLSSFSYYKLTKFIEYKSKEKGVPFYKVNEAYTSKTCSACGIIGTRTKNWFKCECGYEDNADRNAAFNIGKRGLSYMFGSGATAFAQKPNQIRQAQKHLNVVLPINVQDLKS

SEQ ID NO: 2186 - protein, 399 aa, synthetic construct
  REGION 1..399: note = Synthetic
LKVKKTIKTKIMHLTKIKQRLLKEEYYNLQRFLHGESVKLYSANKQQAKRFYKKIKPDKEYPISVRKDLLKVERRRDTKIAKYWARIPVAGRRGGVWVAVKPHCPIELDMEICESKLFKRNGEFYLHITVQKEVEVPKPELAEKTTVVIACDIGEANPLVSVELWDQGKKRKNAQFLGGEMRSVRAHYNHLKKRIGRKKIKHAINWIKEHVANKETRKVNDILHKATTKIVDRALMLKRSGYEPVIVFGDLKNVRQPRVKGKRRCRKTNRKIHTMPSYKIKQMLTYKALWEEVPVIALNEAYTSKLCWRCRSLNTEIRKRCFRCKDCGLEYNRDLNGAINIGNRLLGYMLKSRAAVNTPKTSPEYTALLEKRFDNVSEREGGSPLQQLGVVHPVSWIIT

SEQ ID NO: 2187 - protein, 288 aa, synthetic construct
  REGION 1..288: note = Synthetic
LGKDSCRRKKGGVWVAIKPHCPIEPGMEICESKLFKRKGELSLNITVQKEVDTPKLELNNKTVIIACDIGETNPLVSVELWNQGKKRENAQFLGGEIRSVRAHYNHLKKRVGRKKIKHAVKWIKKHVGDKEKRKVNDILHKVTTKIVDRAETLKRSGYEAVIVFGDLKKVRRPRVKRKTRCKKNNRKIHTMPSYKIKHMLTYKALWKEIPAIPLNEAYTSKLCWRCGSLNTEIRKRSFRCKECGLEYNRDLNGAINIGNRLLGYMLKSRASVNMPQTSPEYIAPKGDC

SEQ ID NO: 2188 - protein, 361 aa, synthetic construct
  REGION 1..361: note = Synthetic
MMKATKTIRCKLIGLTKRKRELLNREYDNFQHWLETGEDRGVYSAYKQDARWLYKKAKRMKGVPIRKDLIDIQKRDTKIAKYWARIRVKGERGGVKVALAHQPFNFEEWEVCESLLVKKDDDFYLYVTVKKEVELKEEYSSIIAVDMGARWVAVSVARHRSKPKFYGRRVRELRGKYFWLRRKLGREKKLRAIKKIGHKERRLVDDELHKIAKDIVDEAERHNAIIAIGDLRGVRDNNKKGRGRKVNRKISSMPSYKLKEYIKYKALERGILAIEIPEYNTSKQCSRCGSMNTERPSQGVFICKDCGYQVNADVNGAKNILKRAVGYMLTVGAVVTRPEGERFVLSHTPQPLASVGCPSLQ

SEQ ID NO: 2189 - protein, 374 aa, synthetic construct
  REGION 1..374: note = Synthetic
MMKVRKTVKCKIVNLTERKKKALEKEYENLQKYLKEEDEDVELYSANEQQADRYYEEINKGKEYPISVRKDLIDIREAENKVAKYWLRVRVASVYGGINVPIKPHIPIPHSGGGVEYCESKILKKDGEFYFHLTVKKTVQAKKSYSGFLAIDVGQKYLAVSVASHRDRPKFQGREIRGIRRHYNWLRKRLGRKKLEREVERLSDKESRKVDQKLHEIAKEIVEEADENDELIVVGSLKGLRENSNDKGKRMNRIISNFPFYKFVKYLEYRANEKGIQVMKMNEHYTSRECSRCGAKGERPNQGTFKCSCCGYEINADFNGAKNIFERTKVALGNIPSVGAVSEPAQNSSDMVSTSGPTSGETEKRSLLLTNEAS

SEQ ID NO: 2190 - protein, 344 aa, synthetic construct
  REGION 1..344: note = Synthetic
MRKTIKAKISNQTNNSKMEIVEREHQRWKEMMHEIFEKGKSDYQEVRTEDRHSMYASYATSKADSKNHPMPIHNDFMKIERRDTEPFEYWLSIPTKERHGGVYVPLEIPYKYYGFEEEWEIGDSYITKQDGEFYVHIKVEKEVEEQNEYSGVLAVDLGVRHVAVTWNTSRKKPRFHGKELRQVRGKYQYLRKKLQSEKKIEAVKKHKDKEKRKVENQLHNISREIVDEAVEDDLAIFIGDLSGHRESDFGKKGNERLHKAPVYQLKQQIKYKAQEAGVLCKEIDESYTTVTCSSCGYERDSRPGNEFHCPECDYQVNSDVNGAKNIASRGSGYMSESEAVVVQP

SEQ ID NO: 2191 - protein, 566 aa, synthetic construct
  REGION 1..566: note = Synthetic
LLAREYEAFQTEVHGGDADLYSATKQQASKVQRQKDQNPDTEQPVVLRNDVFDVAYDEDTVLSSWWVRVPVYDPERGRGNSTWCPAHIPRKDDQLVREGDIRDSELVRRDGDWYVDLVVKRSVTVQDEYADVLAIDMGARWVATTAFLSDRKTTFYGEEVRRIREHYKQLRKSIGKAKPRQGKQVVERIGDAEARKVDDRLHKISRAIVAGVGLARPETQVLVPRDDEPANLSVSVGSTPSGEPHGFSPERMSVDEVLELGKDLVVFVAVALALGLDLDVFLGLGLVLLVFLLDDFDFEDGQRDVFETLADLLPGDARGVFLALDVEHRHLQLQRDETLVGGDEGGVEFLPAMGAGPLAHVDFDVVEVRVEQLAGLRDGDPNGLVRGLHVVDRDCGFHDNSAVHSHVEVVAPTVSSLALKRKLSTFGGRRVPRCTPVRYLSPTSREVSTCRRRSKAARPSSGGATTTAPTRRPTPTAGRRGTTPSSASPPEADAPAETPTWSASASATACWSGRPPPTPTRFSPSDCASTTTSRPSSPSCQTTNSSRRRPTPTAGFESWTTPSSPV

SEQ ID NO: 2192 - protein, 383 aa, synthetic construct
  REGION 1..383: note = Synthetic
QREVATTVRVKLHSLTERKADLLSREYDAFQTAVQGDDANLYSATKQQASKVRKQKNPRRDTEQPVVLRNDVLGVEYDEDTVLSSWWVKIPVYDPELGRGNSIWCPAIIPEKDEPLVHEGTVRDSELIRRDDGWYVHFVIKKRYEVREKYDDVLAIDMGARWIATSVALSTRETTFYGKDVRRIREHYKQLRKSIGKAKVRQGRQVLHRIGNTESRKVDDRLHKISRTIVDDAVSRNAVIAVGDLGGIREDNDKGRHFNDKLHKMPFAKLLSYIEYKAHREGVEVVLVDEAYTSQTCNRCAEKGVRYTQGQFRCPHCGLDDNADKNGATNIGKRVLGKFSKPLSDTGAVLTRPETQVVVDPENSQDSVGLTLSEGTPRLQSWE

SEQ ID NO: 2193 - protein, 381 aa, synthetic construct
  REGION 1..381: note = Synthetic
SAYARKTVVAKILTDRLTNKKREAIEREYNAFQRYVHGEEDVELYSAIRQDAFRHIDRDEIKDEREYPVPIRNQNFDVGLRRDDNDVADWWLKVPVATVYGGVNVPIKPHEPIPGEAELCDSKIVRDDGEFYAHLSIEQQVDVSESYDGVIGVDFGTRWAATSVALPSRNTSFYGEEIRRARRHYGELRTRLQEKGAYRSLRRIKDKERRVVEDRLHKISRSIVEEAKERNAFIVVGDLEGIDDGDKGAEMNRRLSQMPHYSLKQFIEYKARWEGIAVVEVDEYMTSQTCSRCGNQDTAREGQGRFLCDECGLDDNADKNGATNIAKRGLGKSIERPLSSLGASVDRLERCHDETTSGTVLRSGADTEAPTSRSEGVSPNE

SEQ ID NO: 2194 - protein, 372 aa, synthetic construct
  REGION 1..372: note = Synthetic
MKAEKTVKSAVVELTNIKQEELELMWSNYQRWLHTGKGGDRVYSAHRQQAERNLDMDYLKGGKVYPLFLRKDLIEFKDCESDLADYFFKIPSKQRYGGIKVPIKTHMDIKDKYEICESKLLKRNGRFHLHIMIKKDVFVRERYDGVLGIDLGLRQPVTSVALPDRDTVLDGCRIRDVQTHFFYLRRQTNYGSNRSRFYRREYDKVNDCIHKLTNKIVQYAEENNLLIVVGDLEGVQDQKNGKTMNRKLHRFPHYELRRQLEYKARWNGIGYVEVSEAWTSQLCSRCGAKGKRSAGLFRCNNCGLEIHSDKNGAHNIGRRALGKFSRPLSRAGGFVASPRAGSDDLTALRDFYSLVKSASGMQPHQLWSEAPS

SEQ ID NO: 2195 - protein, 337 aa, synthetic construct
  REGION 1..337: note = Synthetic
MEVSKTVQAGVVNLTNQKRTDLETEYRNFQKYIQGEEDVELYSAIKQDATRYYENIKEDKEYPISVRGQLIDIQECSSDIADYFVRVPTAQRYGGLNLPVKTDTEIRDDWEIGESKVIKEDGEFYIHISVSYEVEPVSNLHGVYGIDLGLRNPAVGVALVGGEGSCPKVEAVDFHAQRIQKIQSRYSYLRRNTSTGKSWNSREHDKVNDALHKATTEIADYCQEHKLAVAVGDLEGIQDQDKGREMNRKLHRFPHYRFKQLLRYKLKERGLPLIEVDEAYTSQTCAKCGEEGDRYRGRFRCSGTETNSDVNGAWNIAKRAASKADISSLDDAGATVA

SEQ ID NO: 2196 - protein, 358 aa, synthetic construct
  REGION 1..358: note = Synthetic
MKAEKTVVCRITEPNKNKLKKLEREYNKVQRYIKGQDIDIYSATQQAVDKYTDFNSLKKDKEYPWHLRNDTFTAEKAENTKRFNYWAKIPIAEKHGKITVPIKPHTEITKEMKIHDSKIIKKEYGFELHLSVSKEVEPIKTYKGAIGIDMGLNKLAVSVSLPDRQTHCHGTHIGNIQAKYYFLRRNCSNGYVRKKWDNKDKNKIKDICHQTSRKIVNKAKQNNLIIVLGKLKGIQNQNKGRKMNRKLHNFPHWKLRNYIKYKAKWEGIPVIEVSEVYTSQKCSRCKKIGKRHKGEFKCSNCGLKTDADKNAAHNIAKRGIGKSLKTSSDTRSWKSKDLHTMQNQILCVEPRDMAQSKY

SEQ ID NO: 2197 - protein, 489 aa, synthetic construct
  REGION 1..489: note = Synthetic
MEVSMKTIELKLYRPSLSKRNIMNEALENYSRAYAYLINKAIKEFDDIKDSYKSSAGYYKTNDIVKWISKETLKELNKFGVEPFKDSIKIDFSASLAGVLNNKISRGIEGLQTNFRERPIYFCRYSKNRNYCLLYDEENNKYYAKIYLMNVKNEKRKKAVLNLGKTLRYITGDKELYKECDGKRSFIIVPLAFGKWQEEHLKEALKNPQILKTARLIKRKNEYYLAINIVREVEEAAEPVNFMGISRGINKAINYTIVDKMGSIIFEGCEIEENFTKDKLNSIANKLIKKAGEYKCQAIFERLIDKGDNLTFKDKQGKLYIPIMNCSSYNSLYDIIKSKLRANGMRSPIRVSAVSIFNTCPFCVRHSKANRFSSELLICTSCGKSIAVEKAGSINLARKLIHYSNEKIPIIVKNIDKRIAFINEEIGLEYYPANPFDCQAEFMKEIDNVIARFYENIALEKQKENYKKKLSLIKRLEANKNILKLIESN

SEQ ID NO: 2198 - protein, 526 aa, synthetic construct
  REGION 1..526: note = Synthetic
MRTIVLKIYKPSMKKKQILDEALQNYTMAYQYLLDAAQPEIEKIKSDYVDKNGKYSAKKVSKWIGSNFNLVLNEFDIEPFKDSLKIDFGATIAGYLNLVATGEVSEYPSSYISGEAFNNEYNKVMDLCINDDENPEKSLKRIDRLMSKNENLRPIFFCRYATNRNYSILYDELKDRYYIKMYLMNFHNENRKKFDENSATVLRYISKNRDVFKVHGKPEGFLILPVSFGKYQEKYLQLVSKNPEMIKTARLVKRKEEYFLSINMEIEAVETIKVNNYMGVTRGIENIINYTMVNNIDGTVIYGNEKPKENSIKLNKLHEIANRLIQLAKDNNCQVIMEKLVHKGDKLSYMDKNNKEYNPILGCFQYNRLYDILKYKLPAKGLPPPIRVSSLSIFHTCPRCASNTKGNRFSHNVFMCTNCGMSLSIEEIGSNNLSRKLIKYKNDLVKVKVEGTTEGIKYINSDLGIEFSSKNNYGDNDKLRNTINAVIKDFYINMDSEKRKKTFKKKFSFIKKLETNDDVLKVIKIV

SEQ ID NO: 2199 - protein, 486 aa, synthetic construct
  REGION 1..486: note = Synthetic
MPLKTVSLKLYKPSKRKKEIIDKAIYNYSKAFEYLMEKARYAIENRKDKFFEDNGGYKAYRVTKWVSKETLRELNKFDVEPFKDSLVLDFGMAMASYLNLKGVDSAAGFPEVRSRPVYFCRYDTTRDYSILYDGIKNRYYAKLYLMNSRDEYRSELQHSGTMKLKYLDREDEYLELTGRKERYILVPLCFGKWQEEYLKQAIACKGMLKTARLIKRRNEYYLSISIDLEDGATIETINYLGISRGIKNEINYTVVSMSDGLEGKTGYINFKAIDKSTSNYLHEMSSAIAKLAVDNKAQVIVESLNMNNDRLGYSDEYKPAISAGIYNKMTGLIEYKLKSYGLPPPVLVSSVGIFYRCHVCRNFSYKNRQSESLFICTNCGTVKDIEQLGSINVARKLIEYNKTTIKMNAEVIGDKVRVSNSILEVEFILEHDMLFFERLVEELKKIVENFDKNRLPFTKEDNLKKKLSLMKKIQNAEDLRSVIEIV

SEQ ID NO: 2200 - protein, 547 aa, synthetic construct
  REGION 1..547: note = Synthetic
DFMVIRTITLKLYKPSRRKREIIDDALLRYSMAYQYMLDKAFEQIEEIREKYKEPYGIYSSFKLSKWMDSTLSEELNEFGVQPFKDSLKIDLGMSLAGHLNLKRIRENTSFPLVYLPDDRYDSSYDALMDEIISEGLNDNLKRHKCEKELLRLERKSASLSPIFFCRCATNRDYCLLYDVINKKYYAKLYLMNRSDDRKKALNPSENMLLRYIHKDGGMLKPSDRKERYIIVPLSFGKWQEQYLKTALVDPSIIKTARLIKKKDEYYLAVNIDIEEEKAVETETYLGLSRDLKALACYTIVDSGGQVLETNKFTNLEVNKFAKMKCISSGAFPADVLHSIANEIVALSANNKSQVVVQSMIDKSDRLVWRDEQGRVFKPLLDCRRYNDLVKILEYKLPSRGLPPPIKVSPVGIFYKCPACELQAKKNRISKDMFICTACGQVMEIGHLGSLNLAKKPIQYSKDVLKVNVESTPIGVRLINKELGLDFKPSEDINWFDDFKKEIVDIIENFNANMPGVKDDSKSFKMKYSIIKRLESGKDLSEMIRLS

SEQ ID NO: 2201 - protein, 536 aa, synthetic construct
  REGION 1..536: note = Synthetic
QALAMRTITLKLHKPSRRKREIIDKAMLNYSLAYQYLLDRAFSEIETIKKEYRDKRGGYRGNAVAKWIDKDISRELNRFKIEPFKDSLKMDFGMTMASYLNLSEIQQNVHYPIAYLPEEVWQEKVDTIVYDLAAGRRDLRECEREARKIIEKSTSLRPLFFCRYALNRDYCLLYDSVNNRYYAKIYLLNVKSEDRKHIKANKNRKLWYICKDDKTLENTGRKERFLLFPLSFGKWQERYLKEAIAKPEMLKTARLIKKDGEYYLAVNIRIEEAEKIKTNTFLGVARALAEPLHYTVTDSEGNVTDRGFIATELPGKKKEGGFCLSEIHKISNTIVRLALKNRSQVIVESLVDKGDRLQWSDRDRKRHMPVLNCFSYNRLVSVLEYKLAEKGLPPPIKVSPVNIFYTCPRCGLSSKQNRFSKDMFICTACGLNMDIECLGSLNLARKLCEYGKGPLKVKVERTLTGLRFVNKILGLDLHVDASQDYREEFVKEVQGIIRDFYENMGNYTRNKHFKQKYSLIKTIEGKKDILKLLRIV

SEQ ID NO: 2202 - protein, 512 aa, synthetic construct
  REGION 1..512: note = Synthetic
MGLRTVVLKLHKPGKAKKEIIDKALLDYNKALGFLFAKGASELSAMTEKYRGKEGRNNAMALSKWIDSDISRELNRFDVQPFKDSLKLEFGIAVENCLRSGNNLLGQALPCRPLYFCRYDTKRSYCLLYDKAKDKYYAKLYLLNGTHTRSISGVSGYGGRLVHIHKDSNILGRTGRREAFILVPLEFGKWQEKILKEAADTPENFRTARLFERQGEYYLAVSIETGEVEDIKTSTFMGVSRGIKSRLNYTVVDEKGEILAQGPVSSAGWSRKPGADNSALSSRNAAGMPPGLAPGFIGISVNELHEASRFIADQAYLHKAQVIVQNLPGRSDRLGWMENEQKGIQPVYRQRDYNQLIRLLDYKLPWKCLPKPVKVSSVGIFYTCVECGFHSKSNRLGRDLFICTRCGTAMDIDRLGSLNLARRLIDYGSSKIKITVTRTEEGVIFTNRILGLDIFSSYQENQMVKLKAEIEEIMKRTEEGGIPSNERAQAARLSVVRKLRSAKRLMDLIEYI

SEQ ID NO: 2203 - protein, 580 aa, synthetic construct
  REGION 1..580: note = Synthetic
MGLRTITLKLHKPGKGKREILDGAIARYNEAFRFLLGKACENPEELRGESGVKNSKYATFVLSKRIGKDTLAELNKFDVQPFKDSLKIDFGMTLAGYLKMRQARPETGFPAPDAPRPVYFCRYDVRRCYSLLYNKDKDRFYAKLYLTNRRNARELTEGAGESGRLVYIGGEGGGGEKAEDRKRRETFIIVPLSFGRWQEKILKEAVGNPECLRTARLYKKKDEYYLAVSIDTGDAERIGTVNYMGVSRGLKNKLNYTIVDKKGRPLTSGAISPGGGTAISEDNGPSISLGDESGALNKMHDRHSIKGRHKAKTRSRIPADLIHAAANRIAEIAAAHKAAVIVQNLTEKGDGLTRIMNAAGADGPLCGPIYRIKDYNRLVSILEYKLPGKGLPKPVKVSSVDIYTTCCECGRNSKSNEVMNNMFLCTTCGAAMDIEKLGSFNLAGKLISYSDSPIKIKVARTRQGVMFSNKILGLKCCCDSPENGPETLRRELAGLIAGMGRDGPSGKARRGAGSGGGSSSGTSGAEGEGAGSGHAGETAGMRESSTAGKAADGRVRSAREAMIRKLASAKDMMSMIEYIT

SEQ ID NO: 2204 - protein, 562 aa, synthetic construct
  REGION 1..562: note = Synthetic
MGLKTISFKLHKPGKRKSEIIDTAMRNYTQAYMFMLEKAYCRRAELISLFGDTHGKFSATAASNWARESVAKELDQFDAEPFKDSLLLDFGMTISSWLRLREIQPDSPFPEEKQGFGTSVIRPLYFCRYDTVRSYSLLHDNEKDRYYVQLFLMNRKLAGYFAKTAAKGEAVATGEAVATGEAVATGKNAESVGYASSGLAFKALSADRKLVYIHREKRMLRPCAKNPAYILIPLSFGKWQEEWLKKSLAEPEIIRTARLLKKNGEYFMSISFKTDTAREIKPARYLGISRGWGSEVCYSVIEGRNERTENSAGAVKKEGMLLASGIVKSGDEPENARISINRLHVLANKIVDIASEYKCQVIALNLVGRDDGLGWNEPDGTRLKPLVSHGNYNRLIGLLDYKLPEKGLPQPVRVSPSGIFHTCVSCGLNSNQNRLTKDIFICTECGASMGITGIGSINTARRLIKYSDSRIRIEVVCAGDSKTYRNKLIGLDFTISEDEACQMERLRTEIIRLYEEAFSQNATTAGSPALNKRRSILGKLALQAGESGTSDIKAFTDRLDFV

SEQ ID NO: 2205 - protein, 503 aa, synthetic construct
  REGION 1..503: note = Synthetic
MGLKTIVLKLYKPGREKRRIINEAIINYNHAFGFLLEKAYSSLKKEPVGDIGDISERRSPYFASTLSKNLVREYTSQLNNFDIQPFKDSLEMDLSMTLAGYLKLKTIKHNTGFPLVSVRQSAAEGKLRPVYFCRYDVKRNYCLLYDCAKDRYYVKLYLMNNKNARAVNPEGKSKQRLVYVYKTFEAVNISKRKEPYIIVPLSFGKYQEKILKEAMKNPAILRTAKLKVKGDEYYLAVSVDTGEKEKVYTDTFLGVSRGLKDNLSYAVTDLKGSILSSGSIPVKVSHRKGPLPLNELHILSNAIVKIAKEYKSQVILQNLLDKGDRLEWNKEELSSNRVFSFKAYIKIIRLLEYKLPEEGLPQPVKVSPVDIFYRCHMCNSYSIKNRLNQETFICVRCGASIEIERLGSLNLSRKLTDYSASTIKIKVASNAEGVWLTNNLIGLKLFVPHTKNPMEELKAEIENIIENFKGSNKNFTGKERLKRLSIIKKFTNSKDFMEIIEFV

SEQ ID NO: 2206 - protein, 505 aa, synthetic construct
  REGION 1..505: note = Synthetic
CILGLRTIHLKLHNPSTVKRDIINAAFINYNNAFNYLLKNAYENIASIERDYQSPRGTYSSLTLSKWIDRGLSDDINKFDIQPFKDSLKLDIGMVLASYFVQKKTNPNMPFPSFKADDAAGQLKFRPIYFCRYDVKRCFCFLYDAANNKYFAKIFLMNSKNAKVRFNNTFNRELQYISKKQPEVKGLKKETFIIVPLSFGKWQEGMLRQAVDKPEILRTSRLIMKGNEYFISLSIDLPEDEKIKPATYLGISRGIKNALNYTVADMDGEIIDSGAIGLEELSLSKDLKTNNCILANKIAEIAINNKSVVVLQNLVEKGDKLSWNEDGINYKPIFGCKRYNDLVRILEYKIPQRGLPAPVKVSSVDIFSRCRLCGSNTKKNRFSKNMFICTTCGASYDIDGLGSSNLAVKLIKYQRTPLKIKARKTEKGMLLQNELIGLNLIVPFNENPFDKLMAEVKRISEGVCYDADKADSKDVSSINGLNSIYTANTMINKLVKHNFTNIEII

SEQ ID NO: 2207 - protein, 493 aa, synthetic construct
  REGION 1..493: note = Synthetic
LSYLSITLKLHKPSREKRRILEEAMMNYTRAFDFLLTEAGRCISDIEKNYSGSTLKLSKWVDKDMSTRLNQFHTEPFKDSIKSDFAMTLESYLKLKAAGKKCGFPSGYTDSTGKLTKVRPIFFCRYDIKRDYCLLYNPDKGRYYLKLYLMNNKMARINQNVFAAESKLQYVHQSGLKLENEESKKRYIIVPLSFGSWQEEYLNECLKNPQMLKTARLIERKGEYFITINLKLPQNEKIKTDTWIGISRGIGKPLYYTVTDQMGQLKEAGAIRLKKSDVVNNGNMEQEIYRAANQIVDKALTYNSQVILENIKLQRGGWAYGDYKNYKPMLNKMLYNSLDKILTYKLENKGLPKPIRVSPSGILFTCPQCGKNTKRNRVSKDMFLCVSCGTAYKIDFLGSLNLANKLNKYNADDIKIKVTKETDGIRLCNDLLGLNLQISSMENYMENLRKEIMKTVQEIIESQNHEYDHKDKRWSMVQKIEGYDDFMKHIKFI

SEQ ID NO: 2208 - protein, 516 aa, synthetic construct
  REGION 1..516: note = Synthetic
MYTIKLKLYKPSKRKRDIIDETMKNYSLAYQYLLDRAYEDIKRIERDFKDSIGNYSTMNIIKWIDKDICKELNRFSIEPFKDALKMEFASTIVGYLKLKQSKGRVCYPCAYISDEKLERMYSNITKDFLENKKDFSYYEAEIEKILKKNKPKPLFFGRYDKNRNYCLLYDEKSNRYFAKLYLLNVKSTKRERINVSDERKLKYVYKDFETVEDRGRKECFLLFPLSFGKYQEEYLKQALKNPSILKVARLVKENGEYYLLITLDIKMPDRIETNNFMGVSRGINDDIYYTISDNEGCELESGFISNDNIHCIANQIVERAYDNKCQVIMHKNFNMGDKLKWVDGEREIMPRLSPREYNKLCSILNYKLLEKGLPSPVKVSCKGIYTTCPSCLSNTIKNRFSEKLYICVYCGYADSIEHVGSLNTSRRLIKYRQDKIKIKVVKNNGVLRFINKDLDLNFVPQNPYNCKEEFIEHLKLLIKDFYSKGSINDKNYKKRFSLIKKIENSKDIFEQIQIIE

SEQ ID NO: 2209 - protein, 513 aa, synthetic construct
  REGION 1..513: note = Synthetic
WNMAYKTLMLQLYRPSKRKCAWMDRALLRYSRALQMLLTRFEYQVDTLVESGTKISQRKLLTLIDKKTGKDLNEFHVQPFKDSLKIEFASLAASYIEQKRKNPRARYPLAYLDPADYHAAVSRCIKRFEKEETSRGKFESDCSKVIERAGRPRSLYFGRYAVNRDYCLLYDKFKDRFYAKLYLLNSLDGYFSKTVTSSLSLRYVAKGMPAVSNQAGKKRYVIVPLAFGKRQYEDLKKALENPGLLHTARLTKKKGRYYLMVNMQCGPAPVLSTTSTMGVSRSPFGGLNYTVFDRGGKFLKHGRIAEQAAPNQILYSLCNRIVKTAWENRSQVILEANGGKNDRMPLQDGRCLSNGQYAALAGILKYKLPEKRLPPPVEVSANGLFFTCPRCANRTFRNRISSELFACIECGYASEAEWIGSENLAGRLIKYQRDKVPLTVIKQKDSLLFYNRTLGFECTLPQNMTDYQPMYDELSRYLRDLGGAFQNDPKKYAVWKKLCQSPDLRSAVRLILK

SEQ ID NO: 2210 - protein, 514 aa, synthetic construct
  REGION 1..514: note = Synthetic
MAYKTLMLQIYRPSGHKRALMDGALLRYSQALQMLVGRCEYPVRTLAESGTRVSQRQLLALVDKKTAKDLNEFHVQPFKDSLKMEFASMAASYIEQKRASPGTRYPLAYLDAEHYRAAIAHSIGRFETGEISREKFESECRKLVERAGKVRSLYFGRYSMNRDYCLLYDEFKNRFYAKLYLLNAADAERSESATSGLSLRYVAKDMPPMVNRAGRRRYIIVPLAFGKTQLDDLKRTLENPALLRTARLMKRDARYYLMVNMTCEPAAILPAESTMGVSRSPLGGLSYTVFDLGGTFRKQGRIAAPEGAEQIVYSLCKRIVEIASENRSQVILEANGGRNDRMPVPAEFTGRCLSSRQYVKIADVLKYKLLEKRLPPPVEVSANGLFVTCPRCSGRTLRNKISDELFACVACGYASETEWIGSENLAGRLMKYQRDKVPITVLKEKDSLVFYNKNLGFECVLPQNVTDYRPMYDELGRYLQTLDGAFRNDSRRYAIWKKLRRAPDIRDAVRLVLK

SEQ ID NO: 2211 - protein, 513 aa, synthetic construct
  REGION 1..513: note = Synthetic
TMPCYKTLSLEIREPGRRKRELMDTALLSYTRALEQLLRQCREPVQALARGGRRVTRAQVQALADKDMLRALNVYGVQPFKDSLKQDFATILLSFAARWQKSGGQAGYPCVRLEPEEADARIRALTDAYDAGMLSAAEMRGRLAVVLAHSGRVHPLYFGRYAAARDYCLLYDPGTGRFFAKLHLLNAKSRLPPAPFGRELRVVAPGLPSAQATDGPRRFIVVPLSFGKAQQEVLRQALDHPQILRTARLVRHGDAYRLVLSVEVSCNACVVPQATMGVARAAAALACTVCGRDGAVQGNAMLSARGGQMLFCLAKEITARALEARAQVVLEANGGRGDGFLLRDGGRFQPEVFPAGQYMRLEHILRYKLVEAGLPPPVCVSGSGLNITCPRCGAVTRKNRLSPQMFACVACGYAAPFPFVGSRNLAVRLQKYAGNKVPVYVREENGMRHYFNDALGFSCTVPAEDGETVVFYELSLMAKGRQEDWCEGKKYAMLCKLRAAEDIRNAVRWVPVK

SEQ ID NO: 2212 - protein, 460 aa, synthetic construct
  REGION 1..460: note = Synthetic
LALGYLTLQLKIHRPSAVKRRVMEQAIERYAQALNDLTARRWEALSACIAAGDASRLGGLADAQAMGALNRLGVQPFKDSIKAEFTAFARACMARGKPLGEFRPLKKRSVYFGRKSDSRDYCLLTDGQGRFYVKMTLLNAGEALTGYPAGQRKELRCILPGLPPCGGLARSKRRFVICPLSFGRGTHELLKELIDDPGRLGTARLTERGGEFYLYVSVVAPAAKATAETGRFLGVARGEQGVGWSLWSRSNDSVPAFADGEFAWEGRYLTAKCILGLAEEHGARIVYEAKGCRDDGASALFGEQALPWRDYARLCETLTYKAEWRGLAPPVGVSANGIHFCCPACGSRTKHSLQREEVFLCIHCGTATEVRCAASRSLARRLDYYGGKKLVFSARKLPGGIAVRQELLGFSCTAVDEAGFLLELEGFLREGKKAGRKAASAAAKLRAAPSLKDAVLLEFE

SEQ ID NO: 2213 - protein, 477 aa, synthetic construct
  REGION 1..477: note = Synthetic
MDEAMDRYARALQYMLDFAESQPDRLEGIGKSQKSLRKQAGELVDKELLRSLNKFHVQPFKDSLRIDFMNLIESYVKRREKNPRARYPRIRIDADELMNRLEKPGVSMAEFNKLYEKLDSQKTVYFCRYSDHRDYSLLFNPYKKRLYAKLYLLSQHDEFKLIPHKNPGSIFQVVGKNKLLTTSGRPERFIIVPLSFGKKQEQLLLEALEKPGMLKTARLLKKNDEYYLSVNIAIEPEKIFEVNGYAGFSMADECTMVYTVCGLEGEMLKHGEIEIRSGEGIPPSDRDGLHILANSMTRICLQYKAQAVLETFPRYNALTDILDYKMPLKGLQKPVRVSPFGLWQTCPRCGYNRKKNKVVGDVFLCACCGFGIKRKFLPPYNLAKRLIKYQNDKVHFYCEQHGNRRIIRNALLDISYPLGPSEGIHDFFEYIEKKTDELRGVLSDRENEWTRQEKKLYSVWNKLLTAGDIKDVIVIES

SEQ ID NO: 2214 - protein, 552 aa, synthetic construct
  REGION 1..552: note = Synthetic
EKMISKTVTVQLFAPSRTKKNLLLLTMNRYAMALQYLLDTYHPAVDQLLASGTHPSQFALMKLPDRAALNHLNQFEMQPFKDSLKLDFAMLISSYLSLSSTRKTSYPIVYTDDKDIEELLSSQRPAKAKTVTALSKFHAPRTLLFGRYDTGRDFCLLKDELSGRYFAKTYLFPAISEYRRTYTESRRLALKYATENPTYLETRKQRERYLIFPLACGKKQTAILDEAAKNPSRFRTARLYCRGDKFYLAFCIVKETGNERHPESYIGLARGYDCPLHLSLEGLSTGQDTGSGSRVPESYRLTEPSDACNNNARLHIWANQIIRIARDNSSQILYEGLARRTDLLRAPMPAGKHKAASITTSGKIASLTIPEYKQLCALLPYKAAEAGLPKPLAISPLRLYQTCPSCGHCSSSNRFLPGLMICTKCGYSVDSNVVGSRNLIRRFENYQKQRVIFSCLSEGRDVSIENSILGIKYRIRASSHIEEDFCAQLEEYLITIAPREKPFPYSAELGRQKYGLLRKLRAAPVLADGIELVGLPCKMGTAVSQYLSESEP

SEQ ID NO: 2215 - protein, 522 aa, synthetic construct
  REGION 1..522: note = Synthetic
MVIKTVVLKLHNLSGAKKAVIDDAISRYNRALTYLFGHTRENVGPIASEMKSGSGFLTRRITALLKKEVMDELNQFGVQPFKDALKLDYAMTMVGWLSLRKTQKTARYPHGALDEEAFQERFTELVGEFDERKICRKEFEAQLGRLYSSLHMQKPILFGRYAKNRDYCLLYDEESGRFYAKIYLMSVKDKARRGGIARGDTKLRYVYAGNEPLETDNRQERYLVVPLSFGKRQHEILLQGLKNPKMFKTARLSCKEGEYYLSVNVACEYPQTIRSETYLGITRGLSCAVCYAVTDRDGTLVAEGRIPKGKSFRSKNGMHALANGLVGIAQQYKSTVITYKLGSIGDRLTSGEEHAQLTSGEFNKLVAVVLYKTEAAGLEKPVLVSPRGIFYTCPRCGRNSFRNRFFGGRMICLKCGFSDTLEHIGPRNAARRLIQYGSAALVFYATQGKDDILIENKMLEVKYHAKASREAVEHFYDYVEQLACDMREGRLPLAKRDSKKISYQKRFMQVKDARREVVIIDR

SEQ ID NO: 2216 - protein, 517 aa, synthetic construct
  REGION 1..517: note = Synthetic
MATLTLALKILSPTNIKRQILDDAIGRYNKALQYLLCHTRPLCREIEQQMKEGHTCSTRYIVSRLDKALLKELNAFGVQPFKDALKLDYAITLLTYLSLKKVQKHVRYPMVSLDDEDFQKEFSYLVEKESLDPRQISRLFDKYEAKTSLFFGRYSPVRDYCLLYNQASGRFYAKMYLMNVKDKNRRGNILRQNSQLQYLTKEGGYLEADNKHERYLVVPLSFGKHQLQLLRQGMENPEMFKTARLQKRKNGYYLNVNIEVKAPKGKKATNFMGVTRSLHHSVHYTICDKKKNILDTGWLTADLQSKNSFHQLANQLANLAQKYSAHVIAYRLNSKGDHLWVEDAYPQMSTGKYNKLISMLGYKLELKGQEAPTVVSPRGVFYTCPKCGKNTSRNRLTPQVFLCVRCGHSSALEPNGSYNLATRLLTYQNKKIKFKVEKIGDRVRIYNDILHLSFEGKQDENCLKQFYCYLEEKIEQLRGEKIALEQIETGEQKKYLSHLKRFLEINDVRKEVQVEAD

SEQ ID NO: 2217 - protein, 507 aa, synthetic construct
  REGION 1..507: note = Synthetic
MDEALLNYSYALQYLLDSTHDRIRRIRSEAERAGRGRMRRVAALIDKKELQELNKFGVEPFKDSLKMDYASWVIGYLTIAKRQNNAGYPLLTLNEEQLNDAVFNAIERYDCDEMGRRRLDIFLSRVYGKYNKRKSILFGRYAKTRDYCLLYDRENDRYYAKLYLMNVKSKKRRGNIKRGATQLEYIAPGEREYLPEDNRQERYIIVPLETGKWQRKMLKHCREHPEMLKTARLTAKGKDYYILINIKCCESPQIKPVTTLGVCRSLKGQLRYSIALDQPFSGKLLYPSGGKPDKQLYHALANDICALALRHKAQVVAYKLGEKADNIAFEGKLPLLTAGEYNKVIAMSAYKLELAGLPAPILVSPRGVFHTCPECGRNTQRNRISEKEFMCSSCGYYGCIEEVGSRNLSNILESYRKRKVTFRVRKGKGDTLVFYNEILGIKFETQDTVMAQGQFYQFLQEHISDMREAPLFFRGLTTEQQKKRYSLYQKLFNMEDVRLSVAVVREM

SEQ ID NO: 2218 - protein, 478 aa, synthetic construct
  REGION 1..478: note = Synthetic
MSYRTITIKLLRPTGAKKRLMDDAMDRYAQAFEALLRACRPLCRPGAAAKDLCPRSVLPVVDAFGCQPFKDALQQEVQGVLRSYLARIQKGYRAHYPLTRTDEEDLRRIFSNSGNFSCSEIYTNLQKYDTLRPVSFCRYAAGRDFSLLKSENSKRYYCKLYLLNRQNAIEAPASDDYLQDIVTGQMLRDRHGRRRYLLLPLDAGKWQKQHLQEVERGVALPKNAVLRRRGKEYDLCVRLEYRDPAPCAPVCTLGVARSGSGVCLCIHGGGQDRFQQMERPPGPQGLPVLANRICTLADRLSAQIVAADLSRWTDGAAGASMPAHEYQKLMALLGQRAVRAGLPPVVAVSPQGIGQRCPACGVLRRLPAGVGGLFLCVSCGHVQPKQQLGAANLARALERYGRTQLRVRESHGAGKVCFDCPALALHLETEEGPQARQWFVQQVMQRLEQPETPLTSRQKSILHKLAQPPPAGGWFRFE

SEQ ID NO: 2219 - protein, 491 aa, synthetic construct
  REGION 1..491: note = Synthetic
MPYKTLSFQFETLTRAKREMLHQAMEAYSDGLESVLRGLLERVEAEPAKTKNGYLKMMDRKILAPLNEKGLEPFKDAIKLDAAMILTTYAGRRRRGKTVRYPSVRVYDEELDALVRRESFSKKEYGAALAKLRRLHPLFFCRYDRGRDYSLLRDTKSGRIYAKLYLYNRQNAILVHPERGRELCYLPQETETLQSGKKQRYLLLPLRIGPWQERHLEDIRQGRAIPKSAELSEENGRFALHIRLWYEPAVPLACPNTLGVSRGIRDMLAYAVLDARGQTIEEGTLRREDPQRRSRLHALSGEVLRLAERYRCRILMANLVTRSDALSALAAPGMRVGEYNALIQMIAQKAPAYGLEAPVIVSGNGIFSRCPACQEMRRASVFQGNFICVKCGYSHALETLGAVNLAGALKRYGKKKIPVTVRQEQGRIVFCNPRWGIDFTCEETAEALDHFLRYAAEYVKAMAGGRNAREKSFIKQLEGRELSQCFQYIEV

SEQ ID NO: 2220 - protein, 496 aa, synthetic construct
  REGION 1..496: note = Synthetic
VPYKTIQLKLLRPGAGKRKALDNAIERYTDAFEAILRAFHERYGDLSGADQPQKPDKELMALADGFHAKPFKDALCLDAAAVLKTYRCTLKASGHTSYPVCRTGDRDIEENILKAENPERHLINRTIDKYGSVRPLLFCRFDARRDYSLLRDGKTGRLYAKLYLTELKDAFPPASGERCALRYLMPGGKGDILEEGKRRRRYLLFPIEPGQWGEEQLLKIERGLASPKSASLFRKNGDYYLNVRLWFEPPETLPCENYLGVARGIKNDLYCAVTDAKGRLIHEKGIGLHSVHGINRLHRLSNEVLKLALRYRCKIVMGDLLRFGDRLGREGAFPPLSPMEYGRIFSLLQYKAEFAGLEKPAAVSALSVFRRCPVCGSVRDANRLESDKFLCVECGYFRPLELVGAVNLAGTLERYGKNKLSVVCREEDGNITFYCRLLGLEYTCRNGEGALGGFFGRVEGYIEDPPRPLDKNRRSILRRLSEAESLSGCFAFELRI

SEQ ID NO: 2221 - protein, 496 aa, synthetic construct
  REGION 1..496: note = Synthetic
MPYCTISLKLLAPTAQKTQLLSRAMERYDRAYEQLLEALFPEIDGKIKTMSKGEVAKLVSPEKLKTVDNLNVQPFKDALKRDVSKTLILYRDRLQKGRKQRYPAKKHWEEALEKTLQSGDCLSANTYERVLEKGGRRQPLLFCRYSHVRNYALLKNPGNGRYYAKLYLLSADQALPQREKPKQPLVYLDDHTPLKHSRRPCCYVLCPLQTGAWQARHLQKLEQGEAVAKSAELVNIKGKFYLHVRLWVEPNETEQPTKMLGVARGIDHALCYALCNEEGIVLRTGVLDAPNETTQQEKEKRLMRAVFSLAEEHKARIVLANLITRNDRLDTFAHPQLRVNEYNRMVQKICYQTEMRGMAPAVVVSARGLFLRCPHCGMVHAGNRMEQSIFLCVACGHMEQLETVGAINLAEKLVQYKRKKLDVFYKIHQTEVSFSMDRLGFTYQTENDPQAKQRCLKALKTWLEDEKQPSSKGKEGMIQKLKHARPLESALRFVAQ

SEQ ID NO: 2222 - protein, 497 aa, synthetic construct
  REGION 1..497: note = Synthetic
MPYKTISIKLLEPTKTKSRILEDALERYTEAFHIILKELGEIKSIDSKITKNYILKLLNKDIMDKVDFLNVEPFKDALRMDIAMTLSTYYNRKFISAKINYPVIRTTDDDIESILNGADNLSMVKINSMFNKYEKHRPLLFSRFAYNRDYTLLKDIESSRYYVKLYLFNRNNAVEKVEESYRILKYVTFPEEFLQKNTKKIRYELFPLYIGKWQEHHLNEIEAGMAMPKSAQLIKRGSNFYLNLRIWYESPKKISCNKFLGVVRGISKELFYVICNDSGELVKSGPISAVNVNGKNKLHELSNTVVRLAKENRCVIILENLVNKNDRLKQRNFNIPISIGEYNLFADFVLYKSEFEGIDKPVKVSPNSIFFRCPMCDTVKFINRFEKDKFLCIGCGNSQKLELVGAKNLATTLIRYKYNKIRVYYRRVEGHITFILKLLKIEYECSDDEFATERFYIFLKDFINNSTNTFNKREISIIKKLQAQKDIKDCISYTEIS

SEQ ID NO: 2223 - protein, 464 aa, synthetic construct
  REGION 1..464: note = Synthetic
MPYKTMQIKLLNPSKSKKALLEDAIWRYSTAFEILLREIKEFLPDTPPSKTELLKLMDKNFFKCVSNLGVEPFKDALKLDIARLLAVYFSKKSSYPVTRTFDEDIEVLLKSEEKISKLKLNTVFEKYEKKRPLLFCRFDEKRDYSIFKSEKGTYFAKLYLFNRNNAQNSKRYAVFPLHAAEWNKKFLSDMESGICTPKSAELVRKEDDFYLNVRFWYPAPQKQPFSSYIGISRGINSDLCYAISSKNGEITSRGCINISNIYGLNKLHSISNEIIKLAKENNACIIMENLSTSNDGLKMKGIKLPLSIGDYNKTAFFVSYKAELAGLEVAFVSANSIFYRCTRCGNFKRANRFLKDKFICTMCGHSDNLEEIGSSNLAKTLITYKNNKIPVYYKTEENSIIFRLDILDYEVACAKSLSAANEFCERLQKHIALNMGNFSKHQQFTAKKLLGENAFSKINFIEIK

SEQ ID NO: 2224 - protein, 510 aa, synthetic construct
  REGION 1..510: note = Synthetic
MVIKTVPLKIHRPSARKRRTLDDALARYTLAFDRLLQRLRPKLAGFEGPPTRFALQKLMDKDVMRELNRYDVQPFKDALKMDVASTLLSYLARVSAGKTASYPVARLSDETFDKRFGVLCDVYLNGRQFHREYERLLKKYSALRPLLFCRHDVKRDYSLWYNEANKRFYAKLYLLNSKSPLALHGTGAETSALRYVGPGETRLEESMRPRRYIILPLSFGKWQERHLEMALKNPGILKTAQLVKRDGEYYLNVNMVCPTAGPIRVRSLMGVARSLQGCLAVGLHEHEHSEIYFGRVFSSEDAYEPQKIDNMFLHRLANEVVRLASAYGSQIILYTLGEKNDLLAFEDAKPLLNMREYNLLADLVSYKAELNGLPRPIKISPARVFHTCPVCGSNSRKNRMNRELFLCTGCGYIRNVEELGARNLALMIRTYEKNRIVFKTTKHEGSIRFTNAILGFEYESPLDEYAFDRFLEALRQSIADTHGISKQRLSIHKKLARLNDVRDGIRLVES

SEQ ID NO: 2225 - protein, 354 aa, synthetic construct
  REGION 1..354: note = Synthetic
LREGVEQALERAKEELPSYWRKTLDERTPLYAFNDVEKMKRPRKQILKLPLAEALQVIQQNERPKNGALIDCKESKLVIYPGNGVSLELPIPERALRWLRDKEREVAPLKVHKTVRIQWRPERVQTLKVQIVFRVRRPRPPQPDPKNALLVFVDVNSRYGVVAVFASFDEGYVKIHETLKLRPPNQGRRLREAAKRMRAAAHGSKPNINYALARLSKKFDAQGWVKSAAAEIFKKAMKYAKGRSILMNIDIPNSELIKNSSLQRTLLSMRKVAENLANWYGIHAEFKCFSSRRCPLCGGELKEFRTKRTRIMRCSCGFTEDRDYTPLYWWIKELGLPLPKHPLRALPKPNDPEA

SEQ ID NO: 2226 - protein, 376 aa, synthetic construct
  REGION 1..376: note = Synthetic
EEGFRVLTLRYPISEDVKEFIEEYRVIASHLYWCKRLGLEPDKKVVDKLWERVPSYWRWHLVDPKDPMYLFKGVEKTPMPYRTILRLPLVDALHERKGAYIKDGKLVLRLNKKLELDIPERALKWLEKRLAEKPDKKYVRVFKRDGKLIVQIVLHKINRVEIPRDPLLIVVDVNSSYGIVVNFWDKKLIKTIKFRPPNRGNRWSHVRELMSRRDLLYNQGCLTQKQINVYSSLIRLTLKGSAKGWVQQAVAKIVKRVRRMAKRHGKEPMVLIDAPDYSSLHGTPLQRTLYSFIKYLENQLSWYGVYWEEKKLYSTICPICGGKLIVEEKTRRTRIMKCTNCGFKEDRDNIPLYWTIKHLPALKGEASICEDKKAEL

SEQ ID NO: 2227 - protein, 515 aa, synthetic construct
  REGION 1..515: note = Synthetic
EAYRVWEVKASRELRLRLRRLYSAIALAAERASEELERKHGETFRREPERFREELIEEASKLAGLPKRLLCYAGEWCKMLAEARGKSRRRTRFTPPPIPLLVRVVGNGEVLHGNTAAAVVLDASRGMLRVPSANIAIRLRPSLVKAVLEDVERFSDVKLTLQLTSRGRLRLVTHRKVKQVWWDGEGKLAVIAVDVNSSHGLYVVAVAFNGEAKLVAQRVFKPPNTTVLRLLAAIMSSYSELGNWSEAVHRFEERRDVRRLRRAGKGSAVEEAPRLAERLRAKMNMTPEKAERIARQVSRKVRKVNEDWIRSVLREMRALVRKLRDQGYLVVIVADVPQAESLRGTKLQRTLLRVTKRLENIAWYEGAKWFEPENNVSGKRCPLCGKEGVEVQRRYYKCTRCGLVWGRDWAAAFNAAKLFLKACRAERQFEALNQWLQSHPRALIHGSRSFPKQAERNAPALVPAPAESRLAGAARGAKRQGGAEAEPPPHINGRESAGQAEGAEPMKTLNGAPDQ

SEQ ID NO: 2228 - protein, 503 aa, synthetic construct
  REGION 1..503: note = Synthetic
DAYRVWEVKTNREKRQRLQRLYVRLSSAVKQACKELRKGHGDAFRREPERFSEELAGEASKIAGLPKGLFWYAIEWRGMVAEARRKSKRRSGFTPPPVPLLVKVVGNGETLHGATNALAVLDTSRNELRVPSASIAIRLKPSLTRAVLEDVDRFSDIKLTLQLTAKGRLRLVAHRKVKQVRWGGDVKLAIVAVDMNSSHGLYLMAFAFDSEAKLVSQRVFKPPNTALLRLLAALMTSYSKVKCWDEAVKRFKEERGFEELRRAGYAVKEALRIAERLRAKLNLTPERAERIARQALRKVKKVNEDWVRATLKELRTLVRKLRDQGYTVVFVADVPRAESLRGSQLQRTLLRVAERLENMAWYEGAKWFEPENNVSGRRCPICGREGVEVQRRYYRCPKCNVAYGRDWTATFNASKLYLKACRAEKHLEALQSWLQSHKTALTPAGPGPSSPGSPSRGGPGVPRAARGGDVPAATRAEGRLARRPPRKGRPMTLGGPRISEGGR

SEQ ID NO: 2229 - protein, 378 aa, synthetic construct
  REGION 1..378: note = Synthetic
KFGYRVWKISASKEVRTKLLGFRCSFLNEPKDNLKKYWQAWQKAFEEAREKSKKRTRFKSPPLFLPVRFQLGGVVRGNHNAPVVIDLRSQGELRISRAGIRFPLKPSLTRALREENSLTPRPEFIAQITSQGRLRIIAFRRPRAELRLPIRVIGVDINSRHGITVVSLDIEATGARLVSRLRLKPPNHGWRKRLTSELQRHADTGRGEVPLALPFVLTTERAGRLARKMRHREKGLNAAFVQHVLALLRRLIREAVGRGYSVLVAMDPINPETLRGTGLQGTLLRVVRRVENLALYEGVALALFGRNGNGVSGKLCPLCGGKGVEVAPRRYQCPHCHIEWNRDYNASFRAILLVLQKRAPESAEALRRWLQEHPRALL

SEQ ID NO: 2230 - protein, 562 aa, synthetic construct
  REGION 1..562: note = Synthetic
EPGVRVFKLKTKSIRGKLKEFYDMLTSLLPRDGLPKSAFRYREEWENSFIEVIHSRLATGKWLRPKRRKRGRKRVKRKSGKPIPKRPPFLLTARFILTTNERRGRTDAPVVVDLRKREVRIPCVGVAVPIPERLARALEEENRLEPRPDFVVQLTSSGALRIIAKRAPEPRALEPPLRIIAVDENSRYGFVVAVFDFDERGYCRLTRFEVFKPPNHGYREKVVSALKSFADKPAGALESVRELLPFIPTPSDAGRLARKTLARKRRLNNAFVESFVSEVRELVREASQEGAAVVILVDPIDAESLQGTPLQGTLLRVRERLENLARYEGAHFAEIRASGKLCPFYGVEGRENGHRVFRCPRCGTVWDRDRAAVANLVLRYLRTLYKEECQDADPLRLADAVQAWLKRHPGFLLRVSPVPEGAGVRHRGPSPEGAQRAGRIVTGEPAARRARRLPPLTGGRAPRRGGDAGARASDLEVGERDAVVVENARAGEREEQEEGGSHDHGFGEDPLPLLLAHPRRQRVKYGDVAQRVENHEQHRDGVQQLPNLLDHGRAPLAQPKSL

SEQ ID NO: 2231 - protein, 176 aa, synthetic construct
  REGION 1..176: note = Synthetic
HLRSKAKEFQHIIDTKATVKLFDLHITSERARDFYGEIRSKEKRLNEEWKRSVVAWVRKQMRSNTFTVVLIDEVTAETANNGMARRVTKVLENLCRYEGFHYFPLRASGRYCPKCGAKGVETAPRIFKCPLCGLEWHRDRCATIRLAIAYARITKNERLEEALLQWIEEHPKALLS

SEQ ID NO: 2232 - protein, 435 aa, synthetic construct
  REGION 1..435: note = Synthetic
RGGFRVFKLHADGENTERLRQLFRDFADGRTRVKGALYYRDVWLEEWKNVLKMREEAGKRTMPNPPAALLPARFTMPDGTTRGDKNAPCVIDLRRGELRIPSYGVVVPLRERVCRALVGENGLEPRPDFVLQVTRKGFVRIIARREAYSALGRGGRLRLVCVDENSSYGFVVAVFDYDGKWRLTHFRIYRPPNHGYREGVVSLLQSFADKPSREAREALARIPLAMTPERARELSALAKHRERRENDEFIRRLVGDLRKVVREARERNMHVVVLVDPIDSDTLRGTPLQRTLLRARKHLRNLARYEGAEFRLLRASGKQCPICGSWGVEVAPRTYRCPSCGITWDRDRCAVLRLPLLYLERLEEEREECDDAKYEVGRLATEFRGFLKRHLGFLNPVPQGRGNRNHGPRATGAPARGTEEAVRVKPLPQGRWTSP

SEQ ID NO: 2233 - protein, 403 aa, synthetic construct
  REGION 1..403: note = Synthetic
LGFRVYKPRVSKVNRERLKALYNDVINYILGVVHELKGSKYLAYYADEWVEMYENAKRVREEAGKRTLPKTPPVLVPVRFVMPDGRERGNRNAPAVIDLRKGELRIPSYGIAQKLRRSLVRALIEENSLEPRPDFVLMVTRRGFLRLIASRYVRASVALPLRIIAIDENSLNGEALAAWDVLKPGRIVRSRYEELMPRNRGFLDRMAALFQGAAAGKAGALEEVKELLREAERSEAEIAALLAPKKLAEIAAKTLEREKRLNRAFAEELVSLVRKLVREAKERGWSVAIAIDPINAESLKGSELQRTLLKPRKLLRNLARYEGARFKLYRVSGKQCPNCGEIGVEVGHRRYKCPRCGIEWDRDKCATFWLAKRFLDEHFKEECGDETYVDLDGWLRKHPRGLL

SEQ ID NO: 2234 - protein, 407 aa, synthetic construct
  REGION 1..407: note = Synthetic
ATRTLKFKVLNPTKRKREILNEIFSAYREMVEKCLDYAVKNNVTSRTKLHKALYKELREKYKKYPSHYIYTAITISLSIFKSFRKLKRRGKTKREAPTVNKDLSIHLDDYHLFKFLGDCVRLNTHKGHLFLKLRLSEYHRKILSENIKVKSAWIIRRGDEYFFNLVVKKEVERFRAKGVMTVDVNEKSIDVFIVRPDKLKYIHIDLSEAKHIHFRYSKKLEKMQKIRNPYERRMLLKKYSGRRRKKVEFLIHSATKYLSEVAKKENVRIVLEDLKNIRDRIKYGKKLNRRLHTWNFRKEQGFLEYKHLWNGGNVFYCDAYNTSRECPICGELNPNGRNHVFKCRRCGFEANRHFVACLNMAKRYVKTLMWGVLPFPPKAPMKLSCKWLVATMNGIVEGEGSKIDICY

SEQ ID NO: 2235 - protein, 406 aa, synthetic construct
  REGION 1..406: note = Synthetic
VREVAVKCTQIPLVQLTNRKSELLEHLLTVYRDVVQRAVDYAIENNIKSRGKLHERLYRELRAKYPELASHYIYTAFTMALGIVRGFNKRRKSGRVRKEKPEVSRLNTIMLDDYHLFKLVEDVLRLNVGKSYLWLPLKPTEFQKRILKNVAQGCSLSKKGDRWFLNVTYEDNPESFKPEGVLAYDVNEKSLDMLVAKDGLHYIHIDLSEVKHIHSRYQRKRQRIQKLGLRKLLAKYRGREVRRVNHLLHEVSKFVSDLSLEERLAVVTENIKNIRRRIDKGKKLNRRLHSWSFGKLNFQVKYKCEWGGVPYLKPVNASNNSRTCPVCGVVASLRGQVFKCPSCGFEANRHLVACLNILRKANSNVPSTTPSSANALDEISQEWLVATVKGLLKREGEPNVRKCKVP

SEQ ID NO: 2236 - protein, 440 aa, synthetic construct
  REGION 1..440: note = Synthetic
SRIEKIEKTAKLKLIPLTKRDKRELISLLKDYTEMLREALEIVMKKDIRSRKKAHEACYEYLRRRYPHLHSKYVQEAYKRALAMYKSYRKLLRKWQKLPKRQKRRISPPSPPSIGENKVIELHVDTYRLKKLHQFSLLRVSKGSGDYMTFLVMEYEHAEEMIKEGELKNSRILVDDGGIYLLLTVRKEVEVSRHANKLIIDINEDTVDCLLIDRGAGKALLFTVRHDIRGIRMNYRRIRKGIQMKTRGKRGSNVLLARYGGRERKRVEDRLKKVTTMLAELCAEFGTDLVREDLRDLKSNSKRRSRQLNYRLATFPYRKFIGYVDYKFYERGLDVITVDPEETSITCPICGYADSENRVNKEVFRCRRCGFTFNAQYVACLNIFSRLDEGEVVLRGGRLCLILREAGFVVPVDVAPHEVRISDDALREKPVRIMTKVIKV

SEQ ID NO: 2237 - protein, 375 aa, synthetic construct
  REGION 1..375: note = Synthetic
VTDSITKTLKFKLTPLSRLDRGRAFKLLRIYNAIVSKAQAIVNANDVKSLKRAHKLCYEPLRREFQDLHNKYVQEAYKRALQNYKSYIKKLKEWRKDPSKRKPSPPNPKKNNIIDLHIDVFKITDLDGFRKLRIALGENEYMEFLVIGYEYAEKELNGATIGNSKLMIKGDEIYLLLTIRKHVEVEEHRSKLVIDINENNVSCLLVDLDRKQAILFRMDHDIKDIRVRYRLIRMGIQKKLKNEAEKLLNKYGSRERHRVDDRLKKIAKRLADIAEKVGADIVVEDLEIKRRKGGRKSLKARELNYRLNSFPYRKLLNHIEIEFSERGLKTHKISPEWSSLECPACHNRDRENRINTEIFRCTNADSHLMLTMWLP

SEQ ID NO: 2238 - protein, 313 aa, synthetic construct
  REGION 1..313: note = Synthetic
LTNTAITQALAIFKSYRRPSRKKGNIKRPDVKSSNVVLLNDTHLFWFDWGSLKIATHKGHLTIPLEVYEYSEKFKGWNVKWSRLVRRNGDYWLHVTFRRDVERKEPQGVLRVDVNEKSIDLAIVKRDKVKFVKIDVSEAKFIRDRYFKKRRSIQGRVNGEARSSLLKKYSGREKRRVHAILHKASKVIAKIIDEEGVLPIMKRLKGIRKRVNRRLHSMPFRISQSFIEYKALESVTERSTLKLKTPLAHVRYVAKLITRKDMSLSAGSAASGRTGIRWPLGICPRKPCAHRMIGRRMALKFLQKVSQKAPNFS

SEQ ID NO: 2239 - protein, 441 aa, synthetic construct
  REGION 1..441: note = Synthetic
KPPKITVRCRLEPTPDAEARLRRQAEVWQAMVARALEVAVARNITGRKRLHEAVYGELRGRWPEAPSHYAYTAITKARAIWKSFRRRRRQGRTRKARPELDARRLRLYLDDAHLWTLEERDGAYFLRVAVEGARGRDRLEVRLAGTGWLRRRLGEGFRVKACELVWRDGGLWAHIVLEKPVCAVEVRGLLSVDVNARTVDAADWARGLYMVLVVGAWLAVRNRYLRTIAVIQRRVGGRKARRRLRAKYYGAMNARLRQLLHTCAAWIVRYAAAGGLAMALENLRYVKEANRIDVVTRGIFNRLQAYIAYKAALEGIPVVWVNPRGTSSRCPVCEQAKLKRDGASGAVSCGACGLRAHRQRVGAVGVGRRALQAKAGASPRAGSEPCPASGIGPMAGRLLHGEKAVLRLTEKGWVVEADPGGVVASQGLPTRPKSKPSTVRE

SEQ ID NO: 2240 - protein, 450 aa, synthetic construct
  REGION 1..450: note = Synthetic
KTLERTIKLESDPLNEWKYRALREVEEYQRKIVNEMIDVIISEGLPTTRKRLHERFYSHYKERYPFLPSRVIEGAYITAGRIVKSFRERKRRGLTRKDKPEYERVTITIPNMVNWRFDRASISVLTHKGWVEIPLRVTNQLIRYLYEGWSVSQELKLRLVGRKVLVWLTLEKEVEVGTREGNYISIDVNENNVTVAIFEGFKLKELRRYETGLGRIVVNYSLRREEIARGNSTKDELVKKKLRGLRERKRKIDVLRKTVKRITDLARSLNAKVIVGKFSSRAKEKMGGDKSARLRHRIHQWSVIKFVEMLKSQPIDVEEVSESYTSSVDPFGGGKLKKGRQVVERVVRVFNPYLMTGPAHEGGGIKVFKVNARYLEGGGVLLERDSIAPLNLMRKVDGRVVVFPSTSPSDLRVTVYDPLRGVPVAELEVIKSKERFRHGQTRSLGAPGTR

SEQ ID NO: 2241 - protein, 394 aa, synthetic construct
  REGION 1..394: note = Synthetic
LPTTRKKLHERFYNHYKEKYLFLPSRVIEGAYIVASRIVKSFRERRKKGLTRKDKPEYKRVVITIPNTINWRFNKVSVSVLTHKGWVEIPLRITKQFTHYLYDGWRVSQELKLRLVGRKALVWLGFEKEVEVETEEGNYISMDVNENNVTLAVFEGFKLKELRRYETGLGRIVLNYSLRREEITKGYSTKGELIKKKLRRLRERERKLDILRKTVKRIFELANELKAKVIVGKFSFKAKDRMEGNKDSRLRHRIHQWSVVKFSEMLKTQPVDVEEFSEAYTSSINPFDGKKLRKGKQIKEMITKVFNPYLMTGTAHEGGGIRVLKVNARYLESNQGLLERDSVAPLNLARKVDGRVVMFPSTSPNDLRVTVYDPSAGVPVAELEVIKEDKLRHG

SEQ ID NO: 2242 - protein, 431 aa, synthetic construct
  REGION 1..431: note = Synthetic
KTLERSVALECYVNIFGRRALREVEGAYREMLIEMVDYAVEHNASQETLHRVFYRKFTGQYPWLPTRIIKGAYRDAVRRARSFRVLKRKGKAHKDKPEIRSITIVYSDSQDWRLENAVLKVKTHRGWVTLRYGNNKLLHRYLYGGWRLSSELKLKFIGGRIIAYLTFKRVFNVEYNPLNVVAVDVNENNVTMALFKDAKLIGVYRIETGLGNMVIAYTERRRKITQGNSTKDREVRKRLRRLREKARKRDVLSKTVKAIEELAKENNAIVVIGKITEKAKEKMEEGKGKRLRHRIHQWAVRGLTNMLSDKPIQVVEISEKGTSSHIPFSGRRIKHYRPLVIRNAVRGPGNPFRIRVMKIKLRIAVVNGVVWERDEVGAVNLGLKYLKKILKQMGGVVAYPSTGAHEVWVKLMNPHQGPTHLVATINLNKHQ

SEQ ID NO: 2243 - protein, 311 aa, synthetic construct
  REGION 1..311: note = Synthetic
LREGAIEVRTHRGWIRIVYRNNKHLHRYLYNNWKPSSELKLKLTDGKILVYLTLVREFEISYNPDNAVTVDINENNVTLAVFIDRRLHEIYRVETNIGRIVIAYSERRRKIAENRSARDRVARKALRKLHERERKEDIIYKTAKIIKEIARKYSATVVVGNAHRGKSRMASNANKKSLRHRIHQWCASKIVEILNNKPLYVFEESEAYSSSRDPFSGKPIKRYTPSVIRIALRGGRRVRVIKIQMRLARLSNGLAMDRDMIGAINIGLKYLSSDGRSVASPSTGPHAAWVKLVIPSLGPTPLTELKIFTSI

SEQ ID NO: 2244 - protein, 439 aa, synthetic construct
  REGION 1..439: note = Synthetic
KTLKRTVVVESVYPGRPKLAVLRKLEEAYREMVTEAVEYAVENNARSLAKLHKALYKQFREKHPEMPTRLVKGAIADAARRVKSFLKLKKQGKACTNKPAVKKVTITYPDSQDWRLQGETILLKTHRGWLEIPLRIHKHYIRYRYGEWRLGRELRFKIVGRKVIFYLTFEKELGVNYNPANVVAVDVNEDNVTLAVYEDAKLVYLERIETGLGRIVIAYAEKRRRIMKGRHWSDRIVRKRFKRLARRERNRKLDILRKTAKRITELAREYNAVVIIGDIPRHKEKIVERQKRSALRHRLHQWSVSTLVRLLHDSPVYIELVDERRTSSIDPFSGKRVRRWLPSVTRAAARGGHRYVRAKVYKLRLRLGLVDGYMVERDFIGAINIGAKWLRAHGFHPDVRGMAFPANGAHEAPVMRVNGGRGTNPAHRALIIIKSYSKL

SEQ ID NO: 2245 - protein, 444 aa, synthetic construct
  REGION 1..444: note = Synthetic
VLKSYSLKHELGDELFPLLKAYRDAVNSVLEELWNSIEWKKRKVNGKKQWRLLPKYKVDIHSREYKKKLRDSLLEDWPYAAHWVDSAIKTAYSIFKSWKKNYVKGERKRNKPTARRLFARAKQTLIKLEGERLRLTIKPGEHVYIDLSKRYFPLPKEVSSAGLGEPIITLEKVHLPVHYKDESQEKPSVAWDFNLLSLDGYSPETGWVRVDTSKLASVHISSFEKRRSVQRKASKSKKAKKILAKYSKRERNRAKKHQLEIARVIQSVAGVVGLEELSKQGMYTRSRLWNKMISRSDWRGISRILMGKMGEAKVKELDPYGSSSYCSRCGWENKDLNGAVFECSRCGLRIDRQLNAALNLYMRLKFGYTTNWDGKKKSVELRMEGASQKEWWDHVVLPSLLGGCVLTGAERKTPDELVRELHEVVKPKLYAYDRYADAYLRAPT

SEQ ID NO: 2246 - protein, 450 aa, synthetic construct
  REGION 1..450: note = Synthetic
VFSVLRSYSLKHELGDELLPLLLAHRDVVNRILEELWSHIEWKKRKLPGKKQWRLLPKYKVDIHSKEYKKKLRESLLQEWPYAAHWVDSAIKTAYSILKSWRKNYVKGDRRRRRPTAKRLFARAKQTLIKLEGEKLRLTVKPGEYVYLDLSKRYFPLPGEVSSAGLGEPVITLEKVHLPVHYEDTQSGKPAVAWDFNLLSLDGYSPETGWVRIDTKKLASVHIASFEKRRSVQRKASKSKKARKVLSKYSKRERNRARKHQLEIARVIQSVAGVVGLEELKKQGMYTRSRVWNRRISRSDWRSVKRILVGRLGEAKVKELDPYGSSSYCSRCGWENKDLNGAVFECKECGLRINRQLNAAINLYMRMSFGYIVNWEDGRKRVELRMEGASQKEWWDRVVLPSLLGGCVLTGGKRSDPDELVRGLHDAVRPKLYAYERCADAYLRRVKPIR

SEQ ID NO: 2247 - protein, 371 aa, synthetic construct
  REGION 1..371: note = Synthetic
VDWDYAAHWVDSAIKTAHSILKSWRKNYVKGERKRNKPTARRLFARVKQTLLKLEGEKLRVTVKPGEHVYLDLSARYFKLPSEVSSAGLGEPVITLEKVHLPVHYEDTQSGKPAVAWDFNLLSLDGYSPETGWVRIDTKKLASVHISSFEKEECAEEGFTLEKSKKSSFKVLQQRKKPCEKTPARDYACDPITVWLGGPRRAQKAGDVHASRVWNRRISRSDWRSIARILEERLGEARVEELDPYGSSSYCSRCGWHNQDLNGADIFVCGGCGLRIDRQLNAAINLYMRMSFGYTEKWVGGKKSIQLRMEGASQREWWERVVLPSLLGGCVLTGAELKGTNELVRGLHDAVRPKLYYAYDRCADAYLRIPT

SEQ ID NO: 2248 - protein, 317 aa, synthetic construct
  REGION 1..317: note = Synthetic
MRRGDRKRRRPVARRLFARVKQTLVKLEGDKLRLTLKPGEYVYLDLSHRYFKLPSKVSSTGLGEPVITAEKVHLPVHFEGGAQIEGKPQVAWDFNLLSLDGYSPETGWVRIDTSRLASVHISSFEKRRSVQRRASRSKKARRILAKYSGRERNRARKHQVEVARVITSVSGAVGLEELSKDGMYTRSRIWNRRITRSDWRSIARILEEKLGEDKVAELDPYNSSTFCSRCGWFNRDLNGAEVFECGGCGLRIDRQLNAAINLYMRLRFGYTVTWKDGKKQINLKMGGRFPEGVVGRRRLTIASGWVRPDGGGAEGEQ

SEQ ID NO: 2249 - protein, 444 aa, synthetic construct
  REGION 1..444: note = Synthetic
GKLMQRTRTLPHKHKEDFLPLLCAYRDLLNELIREVWSTIQWRKGRLEDRNTAVSMKQHRLLPTFRSDGQFRRELRTRHLVRWSYAAHWVDSADKTAFAILRSWKKNYVKGERRRICPEVRRLFARAKQSLCKLEGEKLRITLRPREFVWIDLSKRYFRLPQVISRFGVGEPTITPELVHLPIFQDSKMADDLPPMIGWDFNFDSLDGFSPQTGWVKIDTTKLVELHRNSSAKIGSIRARFGKSVKGRRIARKYSHRELHRTRKQQIEIARVMRTASQRIVIEALKKKNLLRRGFFNYRLAITDWRGIAGLAGERVEEVSPRLTSKNCSRCGWTNQDLKGAKVFVCRRCGLSIDRQLNSCIGIYARAEGVPYDQNWWDKVVLPSVVGGYFQSGAELRVTDELVRSLDETVMPQVVYGYDRFEDAYLSLPISAETRVRADVPSMD

SEQ ID NO: 2250 - protein, 407 aa, synthetic construct
  REGION 1..407: note = Synthetic
VIKTYALSHTLQLDAFFRSYLKTLNAMLTEIWEHIQWQSVPIQGKTQHRLLPTLPDYSFKKLMRDIYMRDWIYAKHWVDSALKTAFSILKSWKKNYINGTRKRHKPVVSRQFVRVKQTLMKLEGDHLRITIKPREFVYIDLTKRHFKLQGKLGEPILTKDKIYLPLKHSDLVAESNSDQNPSNIGWDFNLYSIDGFAPETGWIKLETKPLHTLHIASFERRRRLQKKASKSQKVKGILTKNKRRERNRAKNAAHTLANSIIALGRCNGFEDLAKEGMYKKYRIWNRKIARTDWRKIATIAGYKAKNILVDPYHTSKECSRCGWINKDLKGALFECQKCGLRIDRQLNAAINIYLKMGGLPHTRHWFDAQVLGRFTSTGVKRKDFNELARSLYDVMRPQLYVNPLRTT

SEQ ID NO: 2251 - protein, 408 aa, synthetic construct
  REGION 1..408: note = Synthetic
ENRVIKTYSVAHQLSLGPFFTAYKTLLNHFLAEIWRQIQWKEKPIRGKTQKRLLPTIPTYAFKKELRARSLSTWSYAKHWVDSALKTAFAIINSWKKNYFRGNRKRHPPVVKRAFVRVKQTLMKLEGEQLRISIKPREFVYIDLSHRYFKLDGKLGEPILTPTHIHLPLQTSAPDKGSADLIGWDSNKFSLDGFSPNQGWIKVDLKPLHTLHITYDNKRRHLNRLYARNKRQGQALYQKYRKRERHRVQNYLCHLLKPLAAMATTHGFEALDKQKMNRHAKKRWNRELNHTDWRKIVTLMKNKATVREVTPYYTSKICARCGYLHQDLRGEHIFACPKCGLRIDRQLNAAINIYLKMRGVSHKMVWFDRVICGGFPLIGAETSTVDELARRLDELMKPQVYVGVLTSI

SEQ ID NO: 2252 - protein, 420 aa, synthetic construct
  REGION 1..420: note = Synthetic
LPKREIIRAYKLPLKDERLKPFIDFYLTLVRKALQEIWENTRIEKLNKNGKKRVRVKITIPKDKEFKKKLRDKLEEINNKYASHWVDSAIRTAYSIMKIWRKRAIKGKAKIRMPRITRRFVRVKSTLMRVDGEKIRITLVANKEYLHVDFSKSWFYKKDMKVSEPILKEDSVILVFKKDLPLTTPLYAIGLDTNLYTLDGVTVDGKEVHESIKDIFTLKVSMSNKKAKIQSLSSKKQKNMKKVKEKYSHREKNKVKDLVYKKVHEFLNDHRNSIIAIERLNKVKMFNDVSRSLSRKISRTSWRLFHTVLKEKAGEYNSFVIEVDPYLTSKSCSRCGWVDPNLGASKVFICRCGLRIDRQINAGINILLRMCGFPHIPGVFDKVFRIMGGVIPLRGRIVMMSFGSERDEAQGFYGHDNKCP

SEQ ID NO: 2253 - protein, 422 aa, synthetic construct
  REGION 1..422: note = Synthetic
PEEEYVYLTYSIKNDKKEETKILLENYRALLQKALDWLWERTKIEKKEVKKGKRAFTKVKVKLPKKKEVYKKLRDELEKINVLASHYVDKAISDAYSILRGWKRRAEKGQASLRKPTLRKVYVRVKSTLRKVEGEEVRITVRPFEYVTFSWSRTWFSRRVEGLELGEPIIKDDKVHLPFRYKLPWFTPLDFLAIDSNLYTLDAYDGDKFVTFFLKELYSLKYGMELKRSRIQSFASKHGRKGKELLRKYSHRERNRVLDYVHKFVNKLLEMYPLTMFAVEKLNKQEMFRDANDKLSKRISRTVWRTIHRVLKYKAPLYGSFVKEVNPHLTSKSCPRCGWVSRKVGRTFHCERCGFTLDRQLNASLNIYLRMCGFPHLFFTPTGSRWVGVIPLKGRRGMNGAMPRDSSEAQRLRIDIKYYEIL

SEQ ID NO: 2254 - protein, 396 aa, synthetic construct
  REGION 1..396: note = Synthetic
LVKAYSIPHSLDVKDLVDNYMCLLNSVLDDLWGMIEWKRKGNRLIPLIRKDSAFKKELRDKHLRGWVYSKHYVDSAIKQAYSVLNSWRKRYLKGKTGRRKPVLRRRFVRVKDTLYSYRDRVVKISIKPFQESISIDLKESWFWDRIQGLELGELILKEDKLVITVRKKIELKVEKPVAWDTNLLTLDGYDGEKDYTIDLKDIYTIHRTYELKRRKIQSLPPKTAKKLLQKYRSRERNRVNDTIHKIAKQLANRTNVFEDLHNFKERIAETKSRSINRQNSKHDYIKLQKYIEYKSTWNGYLTVYVDPKLTSKTCSRCGYINKDLKGAGVFICQNCGLKIDRQKNASRNIWHAFLRMWGSGFTPKGAKLDDMLPMNPEGDKSGDAQGLSMGSIRIHT

SEQ ID NO: 2255 - protein, 277 aa, synthetic construct
  REGION 1..277: note = Synthetic
VKPHEEYLVFDISRAWFLKRAKGELGELILSEKYLTVTFRFKREEEVKGKIAWDCNEKSLDGFSPSMGWIRIDLTKLFHIHRVYEVKRKRLQRRASKKPSLRRVLARYSKREKNRAGDFVHKLTTFMSRKFKGYIHGFEDLRKERMLNGSKMHNRNISKINWKTIITLMSYKSKVMLLNPKNSTRRCSRCGMVNAPKGASYICKKCGLRVDRQLNAAVNLYLQMEGLPPTPRLFNELVKGWSGFTLTGEEADEGSNELKRSPKLLNPESYVSLFKTT

SEQ ID NO: 2256 - protein, 241 aa, synthetic construct
  REGION 1..241: note = Synthetic
MGELILGERYLTVTFRFRADEGEAEGKIAWDCNEKSLDGFSPETGWIRIDLTKLFDIHRVYETKRERLQRKASKKPSLRKVLAKYSNRERNRAEDYIHKLTTFIARKLKGYAHGFECLGENGSLNGSKEHNRDISKGDYKTIITFMGYKSRVIILNPKNSTRRCSRCGMVNAPKGASYVCEKCGLRKNRQLNAAISLYLQMEGLSPSPKLFDGLMKGWRGFTLIGEEADEGSDELERSLGC

SEQ ID NO: 2257 - protein, 471 aa, synthetic construct
  REGION 1..471: note = Synthetic
RDVRAYKVKHSLDVTHLLAMFRFLLQKAIDMIWENAEWKQEIVENSYIIRFSGKGYKKKLERTIKCLKIQGKKFVVYEDTKRKSCMIKVFYVATRLVPKFPNDKDFKRALRNRLLKFWRNKTAYASHYVDSAIRTAYWILQSWKENYLDGRFKKRKPKVKKLFARIKNSLFFWNGKMLRLTVVPREQYLVFDLSNAWFIERIRGWKLGEIILKENELILMFSKEKKEIPPQGIIAWDSNKYSLDGFGDIGCIKIDIKQLYTIHITYHNIRRKLQQLLRRAPKTARKLLKKYNKRERSRVEDFINKITTQISREFGEYVHCFEKLRKRGMFNWSKKHNRDISIINWRTIKQKLEYKVIELKEINPKYSTKTCSRCGSRNTTIKNGEVICRDCGLWIDRQLNASINLFLRAKKLKPSPKVWEKVVVPKLRMCPVGVGVNGVKPNDLPSMNPEGAEGDETQVPEQSFSIKINYN

SEQ ID NO: 2258 - protein, 290 aa, synthetic construct
  REGION 1..290: note = Synthetic
LRFRIDSNWFYDRVRDWKLGEIILKDKELILMFTKEIEDENINKVISWDMNMFTMDGFGDEIGVVKKSIRELYRIHITYHNKRRKVQKMLNKNPKQARRLLKKINKREKDKVRDFIYKFTTELAREFSDYIHVFEDLNKEVMYNRSKKHNRSIALHNWRRIVEVLKYKVKVIEVDPKFTTKTCSRCGSLDTIIRNGTVICKECGLKINRQLNAAINIYLKGKGLKRTVQVWNKLIKPRLKMWGVGVPPNGAKSNDMPPMNPEGVEDDVAQGEVGQIWVTLSKFVQLPQTP

SEQ ID NO: 2259 - protein, 441 aa, synthetic construct
  REGION 1..441: note = Synthetic
CQILELVRSYSVPIRDDRVWGLITWYVKALQNAIDMIWDNIEWRYSFPELVRKGKKLVVIRGLKVRIPIIPRDRAFKKRLREELMKDNPYAAHWVDAVIRTAYSIMENWRRRYLRGRARKVKPRIRRRFARCKTTLMKIDYQAKSIRITLKQGEYLSISWRSTWFEHRVRGWAVGEVIIFDDRVVIPFKSSKEIEVRRVIGWDSNELSLDGYEPSIGFIHVDLKPLQSMKILYERKKAIAQRKGRRELYEKYVRRERDREKDFINKLSAGLRMLFPNTIHVFEDLDKEDLVSRKKRRKKRRKRNARTPWRRIHRRMSEVALTASVDPRNTSRECPRCGYVVETQEGHVFECPRCGLKMNRHKVASINIRRRYLEGKRRRKRRAGMRGFPHSNEPEETMMVELWVGVTPSGRSPVIWIPMKRDPEGDEAKGRGLDIKQYQAR

SEQ ID NO: 2260 - protein, 363 aa, synthetic construct
  REGION 1..363: note = Synthetic
LKVPVTPKDGGFRRMLRSELLKDCPYASHWIDSVIRTAYSMMESWRRRYLRGRAKKAKPKIKRRFARCKITLTKIDYNTKTIRITLKPWEYLTVSWKGTWFDRRVKGWTVGEVIIKDDRVIIPFKNSKVVKVKRIIGWDGNELSLDGYEPGTGFIHIDLRPLQSIKVVYEKKKAVAQAKNKKELYEKYEARERSRVRDFINKLSAGLVRLLPNSIHVFEALDKGNLTSKERVRRVRRKRNARTPWRKIHKRVSEIALTGSASPKYTSRECPKCGFRVKTQVGHEFKCPRCGLKMSRHNVAAMNIRRRYLKGKHKMWGFPRSEDPEETMKVELRAGVTLNGRSPMIWAPMKWGSEGDEAKGRGA

SEQ ID NO: 2261 - protein, 422 aa, synthetic construct
  REGION 1..422: note = Synthetic
RKDEYEYRAYKIPWYRAHGVSRDEVIKLMHWFRDVVNYVIRYFWSRIWEVDRGRLRANKIELEGGKVIRTPLFPLKPRRPSDDEYNEVRRQLAPRCPWNRHWAYSAVRYAKDIILESWRQRYFRGMARRKMPMLKRLVARAENTLVRSHGNVVRVSIFPWKFIEINTSGMWFLKRVEGWEVAEVEFHEDCIIITFRRPKQRHNVREYIGMDANFDTLDLFSQKHGWVRVDLRPLIHIIQTYDEKRGRIQRLTKKVLKHKVRKLLAKYSKRRNSRVNDYLHKLTTALARLFPDCVIAHEDLSKQGMYGNSRKHNRELRWRPWGRIIALLSYKATTKAVDPRDTSRTCPRCGGRNTERVDGTLVCKRCGLRIDVQLAAAVNIWLRARGIKPSERTWKIIEPATKRRTRLVLDLRSGMLIPAPSP

SEQ ID NO: 2262 - protein, 446 aa, synthetic construct
  REGION 1..446: note = Synthetic
PTEIVLTYKVKHNHDLKNLPYEFIKTSQRAVDVIWENIDWKEKIVKHRYKIGKKKYKYYTTTRLIPEIPKDNDFKKALRNYLLKGWEFASHYVDGAIKTAYSAIESWKSNYLNGKRKRNKPIFKRPFVRVKTTLMKYDKEKGEIRITIKPRKEYLILNIKDEWFFERVKDFDIGEVILKDNEALITFKKQLDLSDKKVVGVDSNLKSLDLYHPEKGWIRVDLSELHRIKRVYDAIIDKLKSIYKKSPKRIGKLLKKYWNRRKNRVEDFINKLTSQLSKLFPDAIFIFEDLDKFNMYDKNSDFNRDLDRTNWKKIAKKLEYKSVVFYVNPHYTSKTCPVCGSKMKSQEGQVVKCDKCGIFDRQFVGCYNIFKRGVELAKKLLGGVGVPVTGVKVDDLLSNEPRGELRPMPPNPNVEAKLPVRKTEGFPLMVYTVDLNGRYLKIYNCP

SEQ ID NO: 2263 - protein, 282 aa, synthetic construct
  REGION 1..282: note = Synthetic
KIGGSRIKIIVKPREEYLELDYSNEWFYERIEGWKVGELIIRENDVLLTFSREVEFSGEVKVGVDSNLMSLDIYHPEKGWIKVDLSELHRIAETYDRIIDRLKSIQRKSPKRIGRLLKKYYARRRNRIEDFLNKLAVQLSREFPNVVFIFENLNKFNMFNVNGREFNRKLSRATWGKIVQKLSYRAPVEFVNPVHTSSTCPKCGSRLESRNGLVECSNCGFKADRQFVGAFNVLMRGLGVALSGAEGDDLLPNEPRGELSLLRPKSVVRVDLSGRTFAHAPP

SEQ ID NO: 2264 - protein, 406 aa, synthetic construct
  REGION 1..406: note = Synthetic
LRIVKAYRLKHIHDVSQFITDYLNILRYAIWIIWNNISWKNDKPILPSTRGFKRKLRSELKSKWCYASHYVDSAIKQAYSIMKSWRKRYIKGKAEKRTPVIKRRFVRIKNTLFTYNEGVIKITIKPYEEYLVIDLSPIIDIISRDLSKNPCKSDIGELILKDNEVVITIRKNFTRRKVRGFIAWDVNLRTLDGLKVDLENNTAEWIRYDISYLHHVHRVYEIKRRKIQKKLHRKQRLMRRLLRKYSRRESNRVNDYLHKLTSFIVREFNEYDHVFEDLTYIKDRIASTRSRRVNRVNAKHDYRKIQKMIEYKALWNGCQAYYVKPHYTSRTCPKCGFKVKTRIGQVLTCPRCGFKADRQFVAVWNIAMKYLQMWGIRGLPESPQRVMTPQTLCWGKGELNKNHKIS

SEQ ID NO: 2265 - protein, 254 aa, synthetic construct
  REGION 1..254: note = Synthetic
LKISIEPNRRYLEVNLRKHDWIPSDFNRIGGLILTREELIITVKREVALKKPRHWASFDVNLTNITALINGRIVRYDLKRLCHIHRVYENKRRKIQQLAKHKPRTAKKLMKKYSKREKNRAKDFMHKLTTKIAKELSENGSGAVLENLKNIKGRVLCKSKNLNRKLSKWNARTFHSMLEYKLKWLGLPVKYVTPANSSKTCPVCSGRLSAYRGRLMKCPKMQPHTRQRRHSSPKPSDAGLRGYSKRHNSPNQGQ

SEQ ID NO: 2266 - protein, 457 aa, synthetic construct
  REGION 1..457: note = Synthetic
YREVKTIRLESRRLTRSKLASISSVLDAFNASVNFLIQQAVRNPAFQKISRGGMRYFAYPFPKVRKTFYCAWKARFRPLHTHYCHSAARIASEIRTSWSTWQRKARAVVDCPVYKKRRARLEAVLCRFDGRNIILVTGPRQHIFVPMAMYQHALKIITMFGIENCGEITISLDERARKLVAYLPFSRDVEATEPCSFVPIDINERSIDHAVVTENALGLGSIDTSEVSTVHYTYSLKRRRIQESIDTSTPYRVKKRKELLAKYGRRERNKTKELLHGVTTRMVAAIEPERPVVVMENLGDIRKASSRQKNLRPWQPLKTRGARRRLNRWNFGMFQQLVTCKVNATGNAVVKVSARNTSRKCIKCGKNTTCRSATFTCQQCGFSMNRHLLAAINILDKYLVDIDKIKSKHQDVASAVPAESDRMKSVAGAFRERVESIGGDRKNVITRVDMLLKVMAF

SEQ ID NO: 2267 - protein, 444 aa, synthetic construct
  REGION 1..444: note = Synthetic
LKTFKTVRLTSFQLTKRKYEKIARAIACFKDSINFLIAKCIDNPLFRKVSKKGNTYYNYSSYPTIRKSFYFEWKAKFPYLHTHYCHSAARITKDILRSWNSWCFKKKRRLPNPNYKKTSMKLEECLCYLEGHYVVLVIEPRSKLYIPFQPTRHFNELRTENHGEITLKLNPDRTVGIFIPFIQEVQPREIASLLFIDTNERSVDFLLVNETSAQVRSLDTTQLSTTHFTYSLKRRNISQKIAQDSKHQPQKRKKLLDKYGKRERNKTTNMMHAVTNEIARTVETNRALVVLEDLTNIRQSLARQKNLKPRHQKKSKKMRRRLNRWNFRQFQIYLEYKVKATGHPVKHINPRYTSQKCLQCGKRTKCWGKIFTCKHCGFTIDRHILATLNIAEVFLSTQDVARPDPAERSRMTMMARAVRNCKDTIIREASHRDEIIGIHPVLST

SEQ ID NO: 2268 - protein, 438 aa, synthetic construct
  REGION 1..438: note = Synthetic
MRDVQSVSSARFVTSPLTRRKRELLDELLGQFAESVNFCIQKCLEHGCTSRASLHHVAYEEWKSRFNLATHWFHSAGQVATQTLRSWRRLCRRGQASPKKPPVYEARTMRLERWDENSTGVCRFKGGSVQICVRRGEYLWLPLIVSEHHEFRYLRDWREGKTKVGEITISIFKDRANVFVPFKREVEPKLAKGVCGIDVNERSVYLCILKQGEQPKHIKIDTSKLASIAHSMELKQKAIQEKLDSLPKRPVQRVRLKKKYQRRRRNRTNQVMHVVSKKIVEVLTRERVEPVFEGLTDIRQSMRSKRKSKNGQALRKDMRRRLNQWPFRKLQNYVEYKILRSGFETRYVEARGTSSTCPMCGRHNRPNGHVFSCRVCGFTGDRHSVGAYNIAARWLTKDVGSDVPPEWRQMQPPAEVAVPPKKLEVEAQKISLQFAAGI

SEQ ID NO: 2269 - protein, 396 aa, synthetic construct
  REGION 1..396: note = Synthetic
EEEMEAVKAVAFKHNVNVKPLLQTFNDMVKECIRYALDHNVSSPMKVERALYDEFKRRYGLATHYCISASRVACGVIRSWKRLVKKGRADPSDPPTLDALSMRLQKELMRFKGDRIVITTRPYHHVEVPLIVGSYQKRFIDAWRNGELSLGEVTLLEDRAVIAFKKTIEEKTPKGYASIDVNLMSIDFLKVKGGLAEYRKVDLKKLYGIRVHYFEKRRKIQSFSKYNPITSKRLMQKYSRRERRRVNDMLHKVTTSIVKELSQEGLAPIFENLKGLSYNATRNRYAKQKNRKVASLPYRKVQNFIEYKMAWLGYRTHYVSARNTSKTCPRCGRLSKADGQAFRCVHCGYEADRHFVACVNMLRMWGHGFAPKALDEMIEREGLGRDKSNKRLCIST

SEQ ID NO: 2270 - protein, 333 aa, synthetic construct
  REGION 1..333: note = Synthetic
LFARLEKCLFRLDRQGKLEITLKEGEYLTLDLIVHEYQQEFLSLDKDYGELILKENGVFIPFKEEVEIKKTKGLLIFDTNETNLTGLLITENEVKTIFYDLRKVYHIHRTYEGKQRRIQKLKRQKPLTAAKIQSKYSKRRKRRVRQLIHVLASHVAHIAKEKGVRVVFGDLKGIREKGNKKRRKWKKKNRKNMNRRLNSWNFRLLQFICEYKVLAQGHQTIYISEAYTSRTCPVCGCMREPNGALFVCERCGFAADRHVTAVINMAKQFGYTYKQLQMWGLPLAPNTFYEVTPFGVTEKEGFRYKLTNVIGSQNGQRPFARRSPAEFVAEAHL

SEQ ID NO: 2271 - protein, 436 aa, synthetic construct
  REGION 1..436: note = Synthetic
TPAVEPRRALVLPLQPRFVPSPAPVGTSTESPSSPPPLPGEPLPPAVTSLLSDFRLLVNLCLRHALATKTTSRGQLSRFGRTQAAELHVLGAFGITASEIALGLARAHRKRLRHGRPSRLPCVRTPFLRTPASAFHFDPETGKVRLSLRRAEWASFVLPVSAHARAVLADPRHRVTQLHLTDRRAVLLYARASPPPYAPTSVVALDTNERSLDGVELRPEGPTYVRVLFPELRTIQAIHVGRRRYLGRKKARDRRVQRRLLAREGWRERHRIRSRLHALTRSLVRELARSRSALVLEDLSALPSPRRRPGSWYRSRAVRRRLSNWPRGELHRQLAYKAQDAGVPVLWVDPFRSSITCPVCGELSEPRRRVGPRFRCERCGWETDRQLNAGVNLARTALRTVAELGGLRLDPDALSEDAVKLLYPVGGSRSGTGGAE

SEQ ID NO: 2272 - protein, 387 aa, synthetic construct
  REGION 1..387: note = Synthetic
LTVPSVVRSLVFAPPSDLPGPARILLDEFRLLVNQCLRHALTTGTTSRGQLSRFVRDRALEARVNGEVALCASKVALSLAAGHRRRIRMGIAARTPYVHTPFLRAPPTAFHFDPETGKVRLSLRRCEWVSFTVPVSDYHRKVLATPGLRVKQLHLGLHRMVLILEKEAPEPYAPTSLIAPDTNESSLDGVRVDGDGGHLVRVTFPELREIQARHFSRRRFLGRKKAHDRRVARQLLKREGGRERHRIRSRLHNLTRQLVERAARDHAALALEDLRGLPIPHRRSRSTRRRLSSWPRAELHRQLSYKAAERGVPIYWVNPYRSSRTFPRCGAVFEHRNRVGPRFDCGQCDWSMDRQLNAGVNLGATVLREHAELGGSDLPPTPFSMRW

SEQ ID NO: 2273 - protein, 412 aa, synthetic construct
  REGION 1..412: note = Synthetic
QSVPSVRRSLPCELASPLPPEIKFLMQDFRLMVNKSIRFAMENNLTAKGSLVKLAQSMAKEYHLNFQHARTATEVALSLSKGHRRRLRKGKECKLPYVYKPFLRADDSTFHVSMENGHVRLSIRAGEWSGFDLILSSYHLDALASGKVKQLTLNEKKAVLVIEKEAPEQYVPSLVIALDTNERSLDGVSLSSYGVVPITVPFPDVSIVQHRHFVRRRKLARKKRRDRRVGRMLLSKEGKREHDRVSQRLHLVSKGLVRAAEQAQAAIVLEDLRLPRGGGRGRRMRRRISSWPQRELHRQIEYKAEELGVPVIKVDPRYTSKTCPRCGEIKQRRSRVGRVFVCDKCGWRMDRQLNAGLNICRTALAELPEAMRRGLGGLRLDPDALADDTMILLYSSGSAGAHGVSGRPGNTR

SEQ ID NO: 2274 - protein, 409 aa, synthetic construct
  REGION 1..409: note = Synthetic
QYAVETHRALTFQVRWQDAQLDWLLSEFRLLVNESIRVALREDIRSRARLVRAAYEDLSRRHIVYKQYIPSAFDVALGVLKAHRRRLRRGRRSSVPYMRQLMLKAENQSYRLDRETGRLRIPIRGTEGMQLHLPLSEWHRSFLRDSGWGLGSLTVVPGKVVLVVRREGAKPYEPEGAIALDTNEDSMDGVFASGDHMVQSVLPLGGVRQIQEIHFRRRRRLARKKAHDRRVMRRLLNREGRREGNRVRLRLHRVSKSVVRFAKETRSAIVLEDLTLHGAGGRSRRMNRRLSSWPRGEIHRQIEYKAALAGVPVIKVNPAWTSKTCPVCGARRRDRVGKEFVCLMCDWEMDRQINAGLNILKTALASNEALARAVRFQPGALRHDVVSPLYDLFRRGMGAREEPSGVESR

SEQ ID NO: 2275 - protein, 317 aa, synthetic construct
  REGION 1..317: note = Synthetic
MLKAENQSYWLDRETGRIRIPIRGTEGVQLHLPLSEWHRSILGDSSWGLGSLTVVPGKVIVVLRKEAPKPYEPQGAIALDTNEDSLDGVHASGDSAGLLRVSFDGVRRIQEIHFRRRRKIARKKAHDRRVARRLLDREGRRERHRVRQRLHRVSKDLVRHATGASAAIVLEELTLHGAGGRSRRMNRRLSSWPRREIHRQIEYKAALEGVPIIKVNPAWTSKTCPVCGARRRDRVGKVFVCLMCDWEMDRQINAGLNILKTALASNEALARAVRFQPGALRHDVVSPLYDLFRRGTGAREEPSGAESQTGVIPSPEP

SEQ ID NO: 2276 - protein, 415 aa, synthetic construct
  REGION 1..415: note = Synthetic
ESALRAWKVVVFRLSIEDGHVLQLMRDFRLMVNKAIRFGLMNHCSSLGSICRGMYHGLRVDHHVYSQHVSQACAIGASILRNHRNRSRRSLGPKPPPFVRRLFIRMENQAYDLDRASGRLRFPIRAGQHILIQLPMSEYHRSILSDSNVKLGSLTLTKSGAALAFSKDVQREFAASSLLALDTNESSLDGVLADASGLTSVRASFPEIRQIQATPFRRRRRLSGKKAHDLRTQRALISREGPRERRRVNYRIHELTSLIVQTALERRSAIVIEDLRGLRPRARSQRMNRRLGHWPRHRIHFQLEYKARWQGSPLIKVNPKNKSRTCPACGSLNNSRRVRPLRDGMFRCRCGWIVDRHVNAALNILKTALASNEALARDVRFQPGAMRHDVVSLSRPAMVRGRGAERSESIRVAHE

SEQ ID NO: 2277 - protein, 280 aa, synthetic construct
  REGION 1..280: note = Synthetic
VKLKLVVSQYHRKYLDDATLSLGSLTVLPDRVIVAFRKETPKPYAPDSIISLDTNEGSLDGVCLQGNDTRVVRAVYPDLAVIQQRHHDRRRRLQKKKAHDRRTSRTLCRREGRREHHRVDYRMHQVANSVLRFAEQNRSAIVLEDLKGMKFTRNKQLNRRLTIWPRRKQHHFIEYKAQWRGIPLVKVDPRYSSKKCPICGRIPDSRMGTLFECECGWRLDRHINASINLLQTAISKGLEVAGGLRFDPGAFQHDVMMTLYDSARGARSEPNGTRCVQAVT

SEQ ID NO: 2278 - protein, 409 aa, synthetic construct
  REGION 1..409: note = Synthetic
KDEMLVRGVVFRLASDLPSEARFLIEDFRLAVNNAIRAGLQARVTSRNALVRIAYRDFHQEHPKMYAQHLVSAFEVAGGALKNHRRRTRKGIACKIPYVKRLMMKAENQAYKLDRESGTVDLPIRAGCHVKMKLVVSRYHRRYLNDPDLSLGSLTLLHDRVIVAFRKAAPAPYTPESIVSLDTNERSLDGVFVGRRPGAAVPVKARFPDVAIIQQRHHDRRRRLQKKKAHDRRTSRNLCRSEGKRERNRIEYRLHKVADAVVSFADGHRSAVVLEDLTGLRFKRGKDMNRRLSMWPRRKLHRIIEYKARWKGVPIIKVDPRYSSRTCPACGRIQDSRMGTEFVCECGWHLDRHINASLNLLQTAISNGMAGGLRFDPGAFQHDVMMILYEPSMAARSEPNGTSCIGEVT

SEQ ID NO: 2279 - protein, 412 aa, synthetic construct
  REGION 1..412: note = Synthetic
FVVKGVVFLLKDRTHDIELPPQLVDLQKTFRLMVNEAIRAGLDLNLTSRFAICKAVYKGFRKDYDVYSQYIPSACEIAGSVLKSHRRRLRKGQRPRRPFVKRLSLKCENQTYRLDRRTGLLDIPIRAREHVQVQLNVSPYHRKYLDDEGLTLGSLTICPDSVIVAFRKDRPVKAPIETVMAIDTNERSVDGVFVSNDDEPLPIRYDIAEVPIIQKRHHDRRKRLMKKKAHDRRMKKKLCGREGKREHDRIEDRVRKVAIRLVSIAKVRNSAIVLEDLKGFRKKKRSKDLQRRLSSWPWSQLHKFICEYADWNGVTVIFVDPYNTSNDCPACGRRNAKSRKDGLFRCECGWECNQHISASLNIYLKAIASNEEVARAVKGRPDASWHDLMMSPYDLFTGARTEANRTSGAVGS

SEQ ID NO: 2280 - protein, 426 aa, synthetic construct
  REGION 1..426: note = Synthetic
TVKALKCVKVPYNPSEEVIELLNAFRYMVNYCIYIGLEKGITSRFKLTREVYNELKEYGYHSWYVLSAIEVAIAILKNYRKTKRRNRRVKVPRARKLMAKIGNQAIRIVDGKLRIPLRPREFFYVELHKRAKILLEEYKVCSATLTPKAIYVAFSKTVKVEEPEGWIAVDVNEDNVTAVSSDGEIKVFDLSKLKEAGYGYFERRRRLQRRYHKDRRVLKKALLKLSKNYRNKVSTMLHQVSTAIVKWCREKDYGLIYENLKGLRKTVNKKTKRFNRFSGKVQEVSRYSKRLKRRLNNWWFRRFLSQIGYKALWEGIRTIESKHTRGSSSTCPICGCRLKRYPNGLVKCEKHGLMNRHVVACVNLLRWEGVVVRPRPPLECSRESSPNELQSDEEKLGKQKRGRYYLEELPEPAIHFSGGKNSDTCA

SEQ ID NO: 2281 - protein, 427 aa, synthetic construct
  REGION 1..427: note = Synthetic
MQAVKAVQIPYQPSEEILSLLETFRNMVNYCVRVGLKKNITSRFRLSNEVYNKLSKCGLHTWYSLSAVEVATAILKNYRKAKRKNPNVKPPYAKRLVAKLGNQAYKVVDGKLRIPIKPRQYFYIPLHKRALEFLSDSTLKLGSVTLTACMVSVVFSKTAEVMEPKGYVAYDVNEKSIDGAYIENGKVTSKSYDLSEICTIRHGYFERVRKVQAKYSRDRRVSQKIQRKWFLNHNNRVNSILHKVSSDIVKHAKEKGYGIILEDLKGIRKSINRKVLGVNKFNGKVQRISRHSKKLKRRLNSWSFRKLQQFIEYKAKWEGVKVVYVNAHNTSKVCAICGCIMQDPKAKTLECCGINRHLNAALNMLKTQDETLRFKVNRSPNEVMHSPLNKAGNKRREVALTSNCNTALVNATEPEMSIIRNLVQLNG

SEQ ID NO: 2282 - protein, 410 aa, synthetic construct
  REGION 1..410: note = Synthetic
PTFLTAIKSVAFQYETEERVTRLLTTFRMMVNHAIWAGMQGGFRSRFSLIKAVYKDFKKYGLHSHYTLNACEVAAAILKNHRRNHRAPVAKKLFLKLDKQTYLLQKETLRIPIKPREFLVLKLRLGDYQSRFLDDPSLTLGSITLTEDKVTVTFKKEEANGLEYRAVTAYDTNELSLDGAFSDGSTVQAIHINLKKIARVRAFHFRRRRNLQARFAHCHRKLRTKMAECEKKEQRRVNAVLHIVTKRLITLAKQSEAEVVLEDLSGIRRTINKRKLNYSGRVRTSLPRSRHLKRRLNTWSFGRLHTFIQYKAAWEGVPLAFVPARYSSRTCPKCGCLLSGEQDPSKRRIFVCPDCGWTCNRHLNAAFNLLKTQDEGRWFSPDRLLNEVMTSEPTRRKLSHNGLAEPTLTS

SEQ ID NO: 2283 - protein, 405 aa, synthetic construct
  REGION 1..405: note = Synthetic
APRMKATKAVRFQYYPNEELIALFNTFKQMTNDAIGTAIQHKITSRFKLIKTAYQDLKRYQLHTHYILSACEVACAVIRNRKRRKTPYIQNPFLKLDNQAYKLEGKTIRIPKKPRQFIHIQLEMGDYQKKLLSDPNIKFGSVTITPRNVVIAVSKDAASYEPEGLIGFDTNEASIDGAEICSNKVSFKSYSLSAVKTLKHTYYAKRRRVQRRFCNDRRKLRELQGKYRQNEKNRTEAVLHRVSKRIIDEVKSKKRGIVLEDLTNIRKEVNRKKNGINLFNGKEQKISVNTKNMKRRLNTWTFKKLQHFIEYKAKWEGIPVSYVDPYYTSRRCPVCGCTVESNGHLTECKNCGLKMNRHLLAALNILKTKDDTLRFRVDSSPSEAVIRSLSKAVSRRKEVHSTPEE

SEQ ID NO: 2284 - protein, 395 aa, synthetic construct
  REGION 1..395: note = Synthetic
GDDADSLPAVPIRGHPEIRARMEACADIQRQAVDHALENGKTAAFTLIKALYPSLRAQHPDLHAVWARSAVRAGAAVVHSFRNRRRKGKTQLQKPEIRRPFVCVRRDLLRIEWDSETLTITIPVSPWDPDPIVLTFRPHHKHRRLLDEWKAGRARMGEPTLTARSLSIPLKFPDPIPYKPEGVIGIDSNEGSLTAFVASTGEIREIDTSHVGKVNRDHLRREIKGTRGKRNPKAKKKIASKHRRIRREKTENFWHHLALALIAWAIGMKSALALEDLKGMKERIGKGKSRRMRQRPLNFWSIMTFHRIPVHKARFYGVPSILVNPQNTSRACPACGRVVDRLRGPVRACPCGVRMGRHVAAAASIARGGVEFLEGSGLRSRGRWATLVAGPLASG

SEQ ID NO: 2285 - protein, 441 aa, synthetic construct
  REGION 1..441: note = Synthetic
KFRFKENQKVKALMAACASIQQQAVDFAIDNNKTATFTIIKALYPSLKAQHPNLHSLWLQSACRAGATVVHSFKNRKRKRMRQRDNGTTGQRTTGKQGNGQWKTNLQKPKIKRPFLYIHKQLLKVDWDGSKLTLTFPISPHDKEPITLVFRPHHRYCRLLDEWKAGKAEMGEPTLTHNSISIPLRFPEVKPYQPKTVIAIDSNELNLTVYDGARDMGQGKFEGCLREIDTSYAAKVSRDHERRVRKGTKGKQNPKAKRKVAAKHGRIRKEKVKNFWHHITLMLIGWAIQWGAAIVLEDLKGMKERIAKKEKSRRVRQRLLNFWSVMTFHRILAFKAAFYGVPLVFVDAQNTSRTCPVCGRVKEGLRGHVFECPCGLKMGRHEVGAMNIACRGVKTLGGKMLPRQGLVGDPCCLSSGFGLKAQSHDRNTQFNCVSLRLDCQA

SEQ ID NO: 2286 - protein, 430 aa, synthetic construct
  REGION 1..430: note = Synthetic
TTLSLKFRFSPVPEVDRLLEKCGAMVRAAVAWALENGKTATHTIVQALYPSFRARFPDLHSTWAQKSARTAAAVVHAFRRRRRRGREGKDKPEVRRTWVYVDKSVFRWAWDGTELTVRIAVRPHDGDPIVLRFRPHGKYRRLVEAWARGECVAGEPTLSRTTLIIPLKFPTLPVYEPGEVYGIDSNERSLDGYGLDGTAWTVDTSWAAEKNAEHDRRVRRGTRGKQNPRAKKKIAEKHGRRRHNRTREFWHIVACAFVWMALSASGALVLERLRGLKERVAASLPKRLRRRLLNHWSIRTFHAILRHKARVYGVPLLEVNLRGTSSTCPVCGAGLRGREELVCPRCGLEGNRHILAAWNIALRGRARLPLGGTGRSEEGRDLFGRLQSPRWGQGVMGAPGRPLPVRVGLDGRRPGRRPAARTQGEAQATA

SEQ ID NO: 2287 - protein, 413 aa, synthetic construct
  REGION 1..413: note = Synthetic
LEVTQTVPFKYEKTIEIDRLLKGYKDIVNLCIQELIRLRKTSLKALHDAVYRKLKAKYSYQTSFYVTAYRVAIQTVKAWRKTGGETPRIEKLFAKVSPLAYKFDGETLRISIKPKQFVYLKLKYGSYQRKFIEAWKRGELKIGEIILNERYVIIPFKRVVELTKPEGYIALDLNENCIVGVSDKGEVKRWDCSYIGRTRAKYEAIRAKIQRNVANHTRKFKRLMAKYGAREANKVKDFLHKLAKQIVKDTKKYNLILEDLKGLRSSTNKRKKKFNRFNGKVQSCSVNPKGFKHRWNSFPYRKIQFLLDYKKRLNGLETHYVDRAYTSARCSVCGSEIKPKEHLCPKCGLNRHVNACLNLLKRFGVAFSPTPQPRNDSMSHALTIQPKAGMRTSMARGEREVGRHLNLSNLPTG

SEQ ID NO: 2288 - protein, 475 aa, synthetic construct
  REGION 1..475: note = Synthetic
KLKGHRIETKTLRSKLLRNDFDLSETNKMFSDVTLFFLLVIKEDPDGVCTHGIDSKRYYEPRFFGDRPTQTFPFEVPQTFRRAALSKACGIYKSWKSNYDNWVALVEKRKARRTESSARQTLGKVNKRGKSDKKHCPPILPTRLKLNANLYSGMFKEDTGSTIVLKILVKGQWKWVKFTYKSAPISPEWKKSTPAIITKPDGSVWLNWTIERYCIATGGIKTLMQDGNRICAVDTDLDGEIMKAVILDVDADGSVNELARTTLSGHRSHVKRRKLRLGKIAKLMSKTGLIIKGFASTRCEQIKRCEREAANQLSAQLIDFAHRWRCAVIVFEFLGNLKPQLGRYSRRSNQKRAYWLKSKVMDETSRKARQNHNILSAKVNPRNTSKLSAIDGCEVLRTSDMDVAELMANNPKVWDNFKRTHGYHPGSLAVTRNGYIINSGYNAARNIGIKFLTRYYESPTLVTQGFDKVASKVTG

SEQ ID NO: 2289 - protein, 461 aa, synthetic construct
  REGION 1..461: note = Synthetic
KVKGQRIETKTQKNKLIRQGTFIEDTLRVYRESIPFYIQVVNQHPLGINLNRDQMRKFYDELTLGNNAKYPFMYADMPRDLRWDVLATAVGHYRAWSTNYQKWVESEAKRKAKAEKKGKEFKPHKAPKLPTEVNDSPTYYKYSMYKDDSGYDLLLKVRVGNGWGWVKFSYFSYDYNEKDANGNSVWIKGCPTIVFKQDGTCWINWIYERYHIATGGVKAQQDKRVCAVDIDLDGDSICVLSVLEPDVNGEVREVARHFVKGHNSHVRRRKSELGRIAVKMKKTGVVGKGFARTRFERISRRENSEGYRISREIANFAHQHDCKVIVFEYLVNLRPQRGKYSRRSNQKRAYWLKSKVYQFTSHIARTSFNILATRVSPKDTSRYCAIKSEQMYRTDSEIRAQFAFQSPNNWDLSMEQEGSHPGKLAVSRSGYCVHSGLNAARNIGMKFYQRYNFKKLVLVRG

SEQ ID NO: 2290 - protein, 455 aa, synthetic construct
  REGION 1..455: note = Synthetic
RKKGYSIESKTARFTLLRDGIDLDETKTAFNDLVSFYFAVVCTHPEGTSKTKEHYKVYEGLTVGHSAQYPIPMDAPCVFRRAAIKKAIGAYKSWKTHYDKWESRHTRHRKHRPPVQPRSFNFNPVFYAGMWKEDTGDSIMLKVRRNNTWVWIKFQYQSYDIGDLWEKASPTVTLKGGKVYLDFTIEKYVPATGGLKTVIQHSDLRICSVDLDLDGNIATCTILESKDNGSVTEISRMTVKGHAKHVRLRKRDLGKVARAMKKTVRVDKGFASHRFQKISRRERHEGLRVSNEIIEFANRHGCKVIVFEHLGSLLPKRGSYSRRSNQKRAYWLKGKIVENVRRIAYQRYAILTARVNPKDTSRLCAVNSVEVWRGNHYLPTLLEFCQPYQYGGKCFATVTGQRGSSGLNAARNIGLKFLARKFVQPKLVLERKAASRKSLLPVRVGFGNVASKVSG

SEQ ID NO: 2291 - protein, 493 aa, synthetic construct
  REGION 1..493: note = Synthetic
KEKGHFQVNESILATISIKHPEYINTTQVLFNDVVMFYVAVMANDVALLISTSSKDLYVVYELLTIKTKERTSVKFPLLFKDVPSDFRRAAIKKAAGIVKSWNSNKIRWDSKIEKALKSKSVKTQNRLKKKAGKPPTLPTKTNFPAQFYSGMFKSDTGETVLIKLWTGNAWVWLKVDYKCRELPQGYIKGSMSLMMCDQQAVLIWTIQKNTPSKGKLDDQIKASGKIRILSIDLNLDDPIVVGKVLEGYEDTGVVVELANLRLCGNNRLSHLRKRILGKIAKAKALTNTHTELGFLPPKNMCANLWKRIKQLEKEIIETISNSIVKFAQQYLVSVIVFENLKTLKPQKGKYSKRSNTKRSFWVAKKIQKRTTEKALNRFSIYTVKVNPAYTSITDAYHGGKCLRGSQVGALNLYLWTKNGLGKLVLTPENKIYDSGENAAKNIGLKYLVRKFEKPVTLKHPGLSTGCVAWLKKPVDKGTVVIPSWFACTATTK

SEQ ID NO: 2292 - protein, 540 aa, synthetic construct
  REGION 1..540: note = Synthetic
ILTTVAALSMLCTFAQWKPVGDKIKTPWAEKVDPANVLPEYPRPQMVRSQWVNLNGLWDYAIKPVGAMEPKTMDGKILVPFAVESSLSGVQKGLTEKDELWYRRTFSVPAAWKGSNVLLNFGAVDWKADVFVNDILAGSHTGGFTPFSLDITPYLKAKGEQKLVVRVFDGTDKGYQPRGKQVLNPNGIWYTPVSGIWQTVWIEPVAKSHISGIKAIPNLDQKNIAVTVAAENCTTGDLVEVKILDKGKLVASATGLPGSPLRLGIAEPKLWSPDSPFLYDMEVSLRQGGKTVDKVDSYTAMRKIGTKRDKGGILRMTLNDKPLFHFGPLDQGWWPDGLFTAPTDEALLFDILKTKELGYNMIRKHVKVEPARWYYHCDREGILVWQDMPSGDMGNKWEMYTYNGGTDKNRTQESKDNFSKEWKEIMDFCKENHTGILVLPEYNEDFSRISMYRSGNYSPLHLSIRIRNYLKYKAWAEGILVLELRADGTEKQCSICGATGKKQGSVFICQNGHQVNRFLNGARNLGRKCQESFRKNNKPS

SEQ ID NO: 2293 - protein, 383 aa, synthetic construct
  REGION 1..383: note = Synthetic
MRLFCSEKQILAETEKLYCEAVAFYYELLKDRNELWTENLLTIQGQLEKLTVPGKDGRVPEYLPPGGKLLVYFRRSAMNKASMAVKTAAASGCFPQKIEANITFFKGMYRDFTSTSVVLKLWNGKKWIWTECGLTGRSFPANSALLSPTLVHEGKWLMLHVPVKQENSDARTAKERMKEGCRVCGVRFTNTDSFAVCSVLDERSRPVSVKNCHGGNAYRHHCKTLLKKIEASKVFTDKDNVDQPNKKYYMRYKHLNEHYAHQVSREILDFCKENQAGIIVLPEYDEDFSRMTMYRSGNDSPLHLSTKIRNYLKYKAWAEGILVLELRADGTEKYCSICGSPGKKQSKLFICQNGHQINHFLNGSRNLACKCQQSFQKRSGSKS

SEQ ID NO: 2294 - protein, 489 aa, synthetic construct
  REGION 1..489: note = Synthetic
WDSFQTVFGIKIKKEITMIKSMTGFGRAEVITKERKITVELKSVNHRYLDLSIKMPRKLVFLEGAIRNLMKTYMQRGKVDVFITYEDYTLSCGALKYNKELAGEYLAYIRQMAEEFGLENDVKAGALSHYPDVLTMEEQSVDEDALWAVLEAPLREACEKFAQSRAREGENLKNDLIAKLDALDEKVSQVEARSPEVVDSYREKLEAKVTFFKGMYSDLTDRSICLKLWNGEKWIWTDCNLKGRSFPQDGQLMSPTLVKEGRRYLLNIPVKQENSDARTAKERMAEGTNLCSVRFTNTDTFAVCCILDEQGNQLAVHTCRGGDAYRHRCKLLETRIQKSRPNTVGDNSPQPNRKYYMHLKNLSEHYAHQVSREILNFCKENQAGIIVLPDYDQNFTRMAMVKSGNFSPLHLSSKIRTNLQYKAWAEGILVLETRTDGLKDKCGICGGKVRRKGNEFLCENGHQGNRFLNDARNLGRKCQESFFRGSRTK

SEQ ID NO: 2295 - protein, 413 aa, synthetic construct
  REGION 1..413: note = Synthetic
TGNWMKTGFCIKTIKYQLRCSHAEWFISTEGYYRDVLNFYYHLLLHRKELWNLNTFQMQRELECLTIEGRDGRKPVYPLPFSKVPLYFRRSAINKAIGCLKSHLGLSPSVDKTEEYDPPLPETIDASLTYFKGMYRELTDTGITLKVWDGSSWHWMECRLKGIPFPANAMVLSPSVVPGSKICWLHVPVKQETTDARNAKERMKSGDNICSVQFTNTDIFAMCCVMDGNGKQLAVRTCRGGDAYRHQCRKLLDKIEFSRQYTDKDNVEQPNKKYYIHLKNLSEYCAHKVSREIVDFCVEKEAKVIVLPLYNTDFSRMVQYRSGNFTPLHLSSRIRAYLKYKAWEAGIIVLEHSADHTSSRCAICGGSIKKQGSQYLCENGHQGSRFLNSARNLGRKCQEDFRKKRGCLNKINI

SEQ ID NO: 2296 - protein, 423 aa, synthetic construct
  REGION 1..423: note = Synthetic
KENTGKSGYSITTWRLHLWCRHPEWLRTTQEFYNRIAEFYYKLLLDHTELWELGSQQTLRELEIMSIPGRGGRIPSDPLPWQKVPLYFRRAAANEGIASAKSYLSRFTQDEKIGRAEKLNAAVTYYKGMYQDFSAKEITLRVWTGDTWTWMHCRLSGRDFPENARLMSPSVVFEYKYDMLHVPVRQNNENTATVRQRMQAGCRILCIQFTNSDAFAAGVVLDGTGQEIAVKFWKGGNEYSHHCRKLLEKIQKSQEATGGRQTGRVDQKYWMHLKHLSEHYGHQITSQILSFAVEQDVSVIVLPRYNQEYSRNVMKGSGNWSPLHLSTRIRQYLDYKAWKNGIIVIEVHATGISKICAKCGAEIIRTDNQNRTMLLCQRTSDEPVSECCEKSREKVPDTVWTQSMKGRTKETEQNISMKSKQVD

SEQ ID NO: 2297 - protein, 276 aa, synthetic construct
  REGION 1..276: note = Synthetic
MYRDFSHKEITLKVWTGEQWKWMRCRLYGREFPAEAELMSPSVTFEKKYLMLHVPVKEFTADTATVKQRIQEGRKICAIQFTNGDVFAVGTVCDGTGKETDVKFWGGGKEYTHRCDQIRKKIEKARKSLGGEKQPGENRKYWMHLKHLSEHYAHEISSQIIGFCLEKQVSLIVLPKYKKEYTDYVMIGSGNWSTMHLSSGIRSNLPYKAWKNGILVIETYAKGISETCSVCGAPVKTVNRKTDEYTCENGHRGSRSLNSARNLSHKCILQFGKQVV

SEQ ID NO: 2298 - protein, 399 aa, synthetic construct
  REGION 1..399: note = Synthetic
KGYYAIRTKRFVLKTSYEPWLWVTWELYNELLRFYYQLFLEHSELHSLGKQKLLRALEQLSIVGRDKRPVEQPLPFKGVPLYFRRAAINAALAAGKSYLAREGQKQPTEAFEAGVTLYKGTYKDLDSHSIRIKVWNGERWLWIRCRLSGNVIKEGDVCLSPRMVFCDERIELHVPVRQPVPDGRTLRERMEKDMDICSVQFTNGDAIGVCCVVDCRGCLRTVRFLRGGRDYAHRCRRIQEKIRISQESVGRRRGSNDNKKYWKKLKQISDDMAHQVSRQIVDFCVETGAGVIVLPKYSETFTKYVMASVGNWSPLHLNYQIRSQLKYKAWQSGILVLESEVSDIKRYCAVCGGVVHSQGEQFVCENGHRGNRRINAAVNLGRKTRESLSEHLSCNKQNG

SEQ ID NO: 2299 - protein, 237 aa, synthetic construct
  REGION 1..237: note = Synthetic
VYREIRFRKGQSICHQDLCLTMVRLSCTSRSGNLCGIQFTNGDAVAVCCVVNSRGSVTGVRFLKGGKYYAHRCRRILKKIEVCSDSSNHKYWKKLKHMSEDMAHQTSRRIVEFCAENGVGAIVLPKYSKTFTKYVMAAVGNWSPLHLNYLIRGQLKYKAWQAGILVLESEVSDIGRYCARCGGLVRRQGEACVCENGHQGNRRVNAAWNLGKKTWQSLSKQVPYCVPPDGARREVCL

SEQ ID NO: 2300 - protein, 380 aa, synthetic construct
  REGION 1..380: note = Synthetic
ESFNMKKSFQIFKRDIGRLSKNIVALIVVIGVCIIPSLYAWFNIAANKDPYGNTANIKIAVANNDVGTENDMLGNLDVGGQIVDTLKENDSLGWVFVSEDKAISGVKSGEYYAAIVIPDNFSESMVSFLSGKIEQPEFDYYLNEKKNAIAPKITDTGANTIQQQVNTEFVSAAAGTVADILNGSVSEIGTKLDDVQNDILTKISTVSDNLKEYEKALDSFNKTVDSSNKLIEKSKKSVGNKSDSQANKKYWKKLKYINEDMSHQISRKIVNFGREHGAEEIVLSKYESEYCNGMEVTGKWPLLQLNYCVRTQLKYKAWQDGIFILETPAADIGKNCALCGAAVHKDGEQFVCNNGHKGNRWLNSARNLGKRTYKSLNKRI

SEQ ID NO: 2301 - protein, 403 aa, synthetic construct
  REGION 1..403: note = Synthetic
SCYSITVKKFNVFCRHTDWLRQTQELYNEILSFYYELYLDTFIDSTPGAMEALRTLEKMTITGRDKQPVPNPLPWTKVPLYFRRAAINAAIAAARSYRTREAQNRRTQQFTESVTFYKGMYRDFNNKEITLKIWNGTAWKWTRIRLYGNSIPETGVMMSPSLVLKRNQTELHIPWKTPVEDGRTAKERMNAKEKICAVVFCNQDACTVCCILDSEGNSEGTRFIRGGAEYSHRCKTVEAKLKKSQESGGAGDNPHANARYWEKLRNLNDFYSHSISRQVIEYCKNNNAKIIALPEFDRDYSKIIMTKAGNHSPIHLSTAIREKIKYKAWQEGIVVVELQQHEISSVCSICGEKIKNKENEFFCPNGHRGNRYLNTARNLGKKCLKGFEQNKEKTASKTPGSCV

SEQ ID NO: 2302 - protein, 494 aa, synthetic construct
  REGION 1..494: note = Synthetic
SAGYAITTYKIQLNYKHLDWFKQTQSLFDAVLAFYYKLLEKQPEVLSLSNQNLLRHLELQTIKQRDGTQPETPLPFEKIPLYFRRAAINAAISMYRSYVGKLKAWEDKQMENRKLEMENVRTESQRDSEMNQIGQADLPQNLPPATFNLPPEPVKNPVENHALVVPQSGSNKQKGRPSPPKHLHMSMLYYKGMYKDFADGSIMLKLYTGKTWAWVKHRYTGRPFPKNAERMSPTIVIKKKKVMLHIPVKEIVEDSRTAKERVKQNEKFVAVALTGSDSLAVCTTIEADGRATAPYFIKGGKELTHRRKLLLGYSKRGIVGNKALSLMTQPIGNAALSVPQEHRPNKKYYDKITRLTNHYAHEVSRKIVDYAIKQGAKLIVLPELKESFDQAKKPYLGKTPYDFIGRRIARYVQYKAWQQGLVAMNSKPYYASTRCYHCDAPIAKHNTEYQNPSANFYGGKNFVCKKGHRGSTALNSARNLGKGFYERFYAGSAL

SEQ ID NO: 2303 - protein, 417 aa, synthetic construct
  REGION 1..417: note = Synthetic
AHMAEKVGSSIVTYRLKLRCDHIDWIQETENLYNKVLGFYYGILTEHLDFLELSNMEVLRRLEQMTIMGRDKQPVVMPLPFQKVPLYFRRSAINAAIGHIRSYMGLLQNWEWKKEKAEKKGHLWKRGKPAPAKSFHASVVFYKGMFKEFGGGSILLKLWNGRSWIWVRYTYYGRKLPKDGIILSPTLINKGKKIFLSVSVKFPVNDIRKVKERKAEKESFCAVHFTASEVLAACAVFSSDGHVTDSYFVRGGKEFAYRRKCLLNRMKKIRKNAAKGGKKLRRSIFCLSSYYAHLVSRRILDYCKEKGVKGIIVPKYAEVEGYLYGQGMGYFLGKKIIQFLRYKAWKEGIILTAVSPYHTASHCCHCGVPVKRYNGGHTPGVRYFGGRLFICQNGHQGNAALNAAKNIGYLFYKTETK

SEQ ID NO: 2304 - protein, 413 aa, synthetic construct
  REGION 1..413: note = Synthetic
KTGHTILTYRVRLYDRHFAWLVATKELYGKVVEHFFNVLQKEEELLQQSDFILLRALEEKCIGTKEMKAVGRAPEYPLTDFPKVPLYFRRSAINTAIDLARKGAETLNPNMVLYKGMYDNFTDKTIDIKLFNGEKWVWVTYPFTGREFPAEAERLSPMLVIEKKTAWLEVPLSFTVDDVRTIKERMQTEEQICAVAFPDNDALAVAVCLDREGNELEHRFFRGGKQKEEQRRRILTRIRESEQSRGLEAGKQRRAEDAEKPDIPQTKENATLYAELRNLNKHYAHHISRQILEFCLEQNIKVIVVPNYESSIDFRDKKYLKTDAYRWLGRSIIKNLKYKAFGAGIVVTTIRPYHISDCCSVCGAKIRKYNEGHTAGQQYYGGRLFRCPNGHSGNTARNTANNVGKSFLTYYKR

SEQ ID NO: 2305 - protein, 447 aa, synthetic construct
  REGION 1..447: note = Synthetic
KAGSATTAYKLRLYDRHLDWIKNTADLYNQIVEFYYKLLLEQQELLELDNYKLLRQLEILTIGTRQMKAEGKEIEYSLNQFLKNKTTKPPIYFRRAAINQAISLIRSYKTRYSIWEEKVQAGQENFNTNMPKETEIFRTHPVFYKGMYRDFTATSIQLKLFNGKKWIWITYPYTGRDFPKEGKILSPFLKVYRKTAYLHVPVETVVQDIRTVNERMETEKRICAVSFPDHDNLAVCAIMTKEGILVDSLFIHGGNTRESQRREILLKLQKSRKSRKGSGREIKNLKGEVSKENAVLLKKLEQINEYYAHQISRKILNYCIEKEIKVIIVPNYGKSIDFQGKQYLNTNRYRWQGRAIIHNLKYKAFKEGIIVTTIPPYHISDCCSICEEKIRRYNEGHRASKDYYGGRLFICPNGHQGNTALNTAKNIGKYFLRRFQKVSLEEENRND

SEQ ID NO: 2306 - protein, 430 aa, synthetic construct
  REGION 1..430: note = Synthetic
KIGYSTTTYRLRLYQKHREWLKMTKDIYNEVVKYYYDILLLEDELWNLTNQQMMRKLELMTIGARYQKEEVKYPFPYGKIPLYFRRAAIHAAIGAGKGFIFRWKLYKEGEIEEIPKKAKEFHASPVFYAGMYRNRTENSIQLKVYNGVKWVWDKYRFHDMGRKLSEDCQMKSPSLKITERGAWLHVPVVTPVEDIRTVNERMKEEQEICVVYFPNNNNLAVCARMDLEGNVREYYLIKGGNKRKNIQKKWQQQLKKSRKSRQSEKRRENIKEEQKQEGKENQKYYKKISQLNEHYAHKVSREILNYCMEREIRLIVVPKYENVISFQNKGYLKTDGYDWIGRRIIRDLKYKSYQNGIVTTTIRPYHISDTCHICDGKIKRYNQGHRASKNYYGGQLYICENGHRGNAAKNSAENIGRYFLKHYQKEKDKV

SEQ ID NO: 2307 - protein, 409 aa, synthetic construct
  REGION 1..409: note = Synthetic
WITITYQFLLFQKSNVCIDTTRELYNQVLKFYYILLSEHNELLKLSDHLLLRELEILTIGTKEQKSAKINPKIPLEGFPKLPIYFRRAAISAAIGMMRSYKKRIESWEYSKEIQEKKCPSSPTRFLAAPVFYKGMYRNFNQKEIELKVFTGKRWEWIYSKLKGRKLPDNGKACSPILKQKGKQIFLYVPVKLPVSDIRTIRERMNIQENFLALAVPNGDCMAVGVVFEMTNVIATRFFYGGKEMKAYCERVLYRLRKSWKSRGETQNLQKQNEKFINSRWYKKIAAIHENYTHQISHQIIEYCKQQQISMIVVPKYQEMTDILNRRYYGWLGRSLISKLKYKAFRQGIIVSSIRPYHMTNQCSNCGAKIKRNKDHPLLFECPNGHNGNFARNTAINLGFRFLKYNLDDL

SEQ ID NO: 2308 - protein, 425 aa, synthetic construct
  REGION 1..425: note = Synthetic
KMGSVTTTYKLHLYRKHLNWLRLTQELYHSVFAFYYEVLLNHQELLERSNYSLMRELEILTVGTKEMKKAEQKPEYPLETFPKLPLYFRRAVINGAISLVRSYQKNLENWEQNPEVFSCPSTARQFHAAPVYYKGMYKDFTESSICLKLYTGEIWKWVKYRYTGRELPKNAEWLSPSIKIGKKEAWLHVPVVETVGDIRTIAERMETEEKILAVSFPGNDVMAVCCVLDKDGKKRKSCFLRGGKELKAKRKQLVRKMEKVRKSRGKKERSEGEVVPERVYLEKIERLNEMYAHRISRKIVSFAQEEDIKVIVVPHYEEEIAFQKMRYFKVSEYDWIGRKIIRFLKYKAFQKGIVVGSVGAYHIADRCSECGSEIKKYNEGHRANKRYYGGKLYVCEKGHRGNSGENTARNIGKRFLERYQGIDEL

SEQ ID NO: 2309 - protein, 417 aa, synthetic construct
  REGION 1..417: note = Synthetic
TGFKTITYRFRLHCEQEEWLKNTKNIYNEVLQFYYSVLLQEPELESLGNMQLMRQLELLSVGSKAERETKYPVPFGKVPLYFRRAAINDAIRLFRSFSAGKEHGANQAGSFGASPVYYKGMYKEFTTESVCLKLFTGERWNWVTCQLDACGREFDGTEKFMSPILKVGTKKTMLHVPMQKPVQDVRTVKERLEDKESICAVAFPSNDCMAVLVLLSPEGEFLESRFIRGGKELSHRRKNLQKQIQENRRRMGAEQWKHSPEENKTLKEKMHRITDDAAHRVSREIVNFCKDKGAGIIVMPHYKSALDFTTMAYMSATNYDWLGRRIISYVKYKSFGEGIVSTTVNPGNISAKCYLCGENVKKYNGTSTPGVHYYGGKNFVCLNGHKGNSYFNSAMNIGLKFLRERAGAPAKETEKKS

SEQ ID NO: 2310 - protein, 405 aa, synthetic construct
  REGION 1..405: note = Synthetic
MLISYRFRIYPSKTVQAKLNEQLELCRWLYNRLLSEVNKARKEGRRIRREDTQSLIVRIKREEKPELSKVYSKVLQMVNYQLRSNISSLNELRKKGVKVGWLRYKTSPNSFKTLNFNQSGFKIDFDRKKLSLSKVGDIPIRLHRSIGGKIKGVIIKRTKSGKWYAIVQAEVDKQPLPPTGRAIGIDVGITHFCVDSDGNYFEHPKYLDRTLEKIKKVQKQLSRKQKGSKNREKVRIGLAKLYEKLENQRNDFLHKLSRYYVNNYDIMVVEDLNVKEMAENGSSTTLNRHITDSAWSKFVRLLCEKAERAARTVVKVNPKNTSKRCAMCGYIVNNLKLHDRTFTCPICGWEADRDYNASLNILDVGMGRSRTPVEGEPLPCVISYREVIAGQVLSMKQEVPSVRAE

SEQ ID NO: 2311 - protein, 375 aa, synthetic construct
  REGION 1..375: note = Synthetic
MSLLSVKCKLIPDASTAEKLSRTVNQFANACNYALQVARRDNIWNKFALQRAVYADLRAEYGLSANLAIRAIARVGKRKGHKAGGFKATSVDYDQRILSVNVDTETVSLSTVDGRVKVPMRIAGYQRHLLRTAKSIQGGQLVRGRDSSWYIHLWCEYDDPPVLDPQGMLGVDLGIVNIATDSDGETYSGKHLNSVRHRHRRLRKKLQKKGTKGAKRRLKKLSGKETRFSNHVNHTLSKRIVAKAQRTERALALEDLQGIRERVRLRRPQRATLHSWAFFDLGQKLRYKAERAGVPLVFVDPRNTSRQCPACGHAERANRPTQALFRCVACGYSGAADYVAAVNIAVRGWAAVNRPYLGEASRVSLHGSVPGSPRL

SEQ ID NO: 2312 - protein, 401 aa, synthetic construct
  REGION 1..401: note = Synthetic
MLESQPITVACKLQVANTLAKEIDETMMVFACACDWVNQNTPEKMTNKTAMQSLVYQDVRVNFGLSSNLAIQAIRRVCANRKTAKQKGKKVKEFKPTSISYDARIFSFRESDWTVSVKLLNSRQRIKLLIGNYQIGLLKSKNPTSATLVKRKSGNYYIHITLDEPTQPEAKTDKVLGVDLGRTDIATTSEGESWSGKQITAKRNHYAKLRTTIQKKASKGTRSSRRRCRQLLARLSGKERRFQKHINHEISRQLVNNAVTNKQAIAIEDLTGIRERTNRKPRSKKDKRLGNNWAFYQLRQFLTYKCILAGVKLILVNPAYTSLSCHKCLVIGDRKGKGFSCNNCGNKCDADYNGAQNIKALGAIINRPGGSGLSCKLKTNVQYIQLSLFEGLGLLKTSTSA

SEQ ID NO: 2313 - protein, 408 aa, synthetic construct
  REGION 1..408: note = Synthetic
MIRNKAFVVRLYPNAAQTELINRTLGSARFVYNHFLARRIAAYKESGKGLTYGQTSSELTLLKQAEETSWLSEVDKFALQNSLKNLETAYKNFFRTVKQSGKKVGFPRFRKKRTGESYRTQFTNNNIQIGEGRLKLPKLGWVKTKGQQDIQGKILNVTVRRIHEGHYEASVLCEVEIPYLPAAPKFAAGVDVGIKDFAIVTDGVRFKHEQNPKYYRSTLKRLRKAQQTLSRRKKGSARYGKAKTKLARIHKRIVNKRQDFLHKLTTSLVREYEIIGTEHLKPDNMRKNRRLALSISDAGWGEFIRQLEYKAAWYGRLVSKVSPYFPSSQLCHDCGFKNPEVKNLAVRTWTCPNCGETHDRDENAALNIRREALVAAGISDTLNAHGGYVRPASAGNGLRSENHATLVV

SEQ ID NO: 2314 - protein, 7 aa, Simian virus 40
PKKKRKV

SEQ ID NO: 2315 - protein, 16 aa, synthetic construct
  REGION 1..16: note = Synthetic
KRPAATKKAGQAKKKK

SEQ ID NO: 2316 - protein, 9 aa, Homo sapiens
PAAKRVKLD

SEQ ID NO: 2317 - protein, 11 aa, Homo sapiens
RQRRNELKRSP

SEQ ID NO: 2318 - protein, 38 aa, Homo sapiens
NQSSNFGPMKGGNFGGRSSGPYGGGGQYFAKPRNQGGY

SEQ ID NO: 2319 - protein, 42 aa, Homo sapiens
RMRIZFKNKGKDTAELRRRRVEVSVELRKAKKDEQILKRRNV

SEQ ID NO: 2320 - protein, 8 aa, Homo sapiens
VSRKRPRP

SEQ ID NO: 2321 - protein, 8 aa, Homo sapiens
PPKKARED

SEQ ID NO: 2322 - protein, 8 aa, Homo sapiens
PQPKKKPL

SEQ ID NO: 2323 - protein, 12 aa, Mus sp.
SALIKKKKKMAP

SEQ ID NO: 2324 - protein, 5 aa, Influenza virus
DRLRR

SEQ ID NO: 2325 - protein, 7 aa, Influenza virus
PKQKKRK

SEQ ID NO: 2326 - protein, 10 aa, Hepatitis D virus
RKLKKKIKKL

SEQ ID NO: 2327 - protein, 10 aa, Mus sp.
REKKKFLKRR

SEQ ID NO: 2328 - protein, 20 aa, Homo sapiens
KRKGDEVDGVDEVAKKKSKK

SEQ ID NO: 2329 - protein, 17 aa, Homo sapiens
RKCLQAGMNLEARKTKK

SEQ ID NO: 2330 - protein, 4 aa, synthetic construct
  REGION 1..4: note = Synthetic
GGGS

SEQ ID NO: 2331 - protein, 5 aa, synthetic construct
  REGION 1..5: note = Synthetic
GGGGS

SEQ ID NO: 2332 - protein, 9 aa, synthetic construct
  REGION 1..9: note = Synthetic
GGSGGSGGS

SEQ ID NO: 2333 - protein, 15 aa, synthetic construct
  REGION 1..15: note = Synthetic
GGGGSGGGGSGGGGS

SEQ ID NO: 2334 - protein, 20 aa, synthetic construct
  REGION 1..20: note = Synthetic
GGGGSGGGGSGGGGSGGGGS

SEQ ID NO: 2335 - protein, 25 aa, synthetic construct
  REGION 1..25: note = Synthetic
GGGGSGGGGSGGGGSGGGGSGGGGS

SEQ ID NO: 2336 - protein, 30 aa, synthetic construct
  REGION 1..30: note = Synthetic
GGGGSGGGGSGGGGSGGGGSGGGGSGGGGS

SEQ ID NO: 2337 - protein, 35 aa, synthetic construct
  REGION 1..35: note = Synthetic
GGGGSGGGGSGGGGSGGGGSGGGGSGGGGSGGGGS

SEQ ID NO: 2338 - protein, 40 aa, synthetic construct
  REGION 1..40: note = Synthetic
GGGGSGGGGSGGGGSGGGGSGGGGSGGGGSGGGGSGGGGS

SEQ ID NO: 2339 - protein, 45 aa, synthetic construct
  REGION 1..45: note = Synthetic
GGGGSGGGGSGGGGSGGGGSGGGGSGGGGSGGGGSGGGGSGGGGS

SEQ ID NO: 2340 - protein, 50 aa, synthetic construct
  REGION 1..50: note = Synthetic
GGGGSGGGGSGGGGSGGGGSGGGGSGGGGSGGGGSGGGGSGGGGSGGGGS

SEQ ID NO: 2341 - protein, 55 aa, synthetic construct
  REGION 1..55: note = Synthetic
GGGGSGGGGSGGGGSGGGGSGGGGSGGGGSGGGGSGGGGSGGGGSGGGGSGGGGS

SEQ ID NO: 2342 - protein, 60 aa, synthetic construct
  REGION 1..60: note = Synthetic
GGGGSGGGGSGGGGSGGGGSGGGGSGGGGSGGGGSGGGGSGGGGSGGGGSGGGGSGGGGS

SEQ ID NO: 2343 - protein, 65 aa, synthetic construct
  REGION 1..65: note = Synthetic
GGGGSGGGGSGGGGSGGGGSGGGGSGGGGSGGGGSGGGGSGGGGSGGGGSGGGGSGGGGSGGGGS

SEQ ID NO: 2344 - protein, 70 aa, synthetic construct
  REGION 1..70: note = Synthetic
GGGGSGGGGSGGGGSGGGGSGGGGSGGGGSGGGGSGGGGSGGGGSGGGGSGGGGSGGGGSGGGGSGGGGS

SEQ ID NO: 2345 - protein, 75 aa, synthetic construct
  REGION 1..75: note = Synthetic
GGGGSGGGGSGGGGSGGGGSGGGGSGGGGSGGGGSGGGGSGGGGSGGGGSGGGGSGGGGSGGGGSGGGGSGGGGS

SEQ ID NO: 2346 - protein, 80 aa, synthetic construct
  REGION 1..80: note = Synthetic
GGGGSGGGGSGGGGSGGGGSGGGGSGGGGSGGGGSGGGGSGGGGSGGGGSGGGGSGGGGSGGGGSGGGGSGGGGSGGGGS

SEQ ID NO: 2347 - protein, 10 aa, synthetic construct
  REGION 1..10: note = Synthetic
GGGGSGGGGS

SEQ ID NO: 2348 - protein, 32 aa, synthetic construct
  REGION 1..32: note = Synthetic
LEPGEKPYKCPECGKSFSQSGALTRHQRTHTR

SEQ ID NO: 2349 - protein, 20 aa, synthetic construct
  REGION 1..20: note = Synthetic
PKKKRKVEASSPKKRKVEAS

SEQ ID NO: 2350 - DNA, 27 bp, synthetic construct
  misc_feature 1..27: note = Synthetic
  source 1..27: mol_type = other DNA
ggtggtagtggagggagcggcggttca

SEQ ID NO: 2351 - protein, 21 aa, synthetic construct
  REGION 1..21: note = Synthetic
GGSGGSGGSGGSGGSGGSGGS

SEQ ID NO: 2352 - DNA, 72 bp, synthetic construct
  misc_feature 1..72: note = Synthetic
  source 1..72: mol_type = other DNA
ggtggaggaggctctggtggaggcggtagcggaggcggagggtcgggtggtagtggagggagcggcggttca

SEQ ID NO: 2353 - DNA, 48 bp, synthetic construct
  misc_feature 1..48: note = Synthetic
  source 1..48: mol_type = other DNA
tcgggatctgagacgcctgggacctcggaatcggctacgcccgaaagt

SEQ ID NO: 2354 - DNA, 192 bp, synthetic construct
  misc_feature 1..192: note = Synthetic
  source 1..192: mol_type = other DNA
gtggataacaaatttaacaaagaaatgtgggcggcgtgggaagaaattcgtaacctgccgaacctgaacggctggcagatgaccgcgtttattgcgagcctggtggatgatccgagccagagcgcgaacctgctggcggaagcgaaaaaactgaacgatgcgcaggcgccgaaaaccggcggtggttctggt

SEQ ID NO: 2355 - DNA, 108 bp, synthetic construct
  misc_feature 1..108: note = Synthetic
  source 1..108: mol_type = other DNA
ggtggttctgccggtggctccggttctggctccagcggtggcagctctggtgcgtccggcacgggtactgcgggtggcactggcagcggttccggtactggctctggc

SEQ ID NO: 2356 - DNA, 12 bp, synthetic construct
  misc_feature 1..12: note = Synthetic
  source 1..12: mol_type = other DNA
acttgtttaagt

SEQ ID NO: 2357 - protein, 9 aa, synthetic construct
  REGION 1..9: note = Synthetic
IEVMYPPPY

SEQ ID NO: 2358 - RNA, 25 nt, synthetic construct
  misc_feature 1..25: note = Synthetic
  source 1..25: mol_type = other RNA
gggaacaaagctgaagtacttaccc

SEQ ID NO: 2359 - DNA, 18 bp, synthetic construct
  misc_feature 1..18: note = Synthetic
  source 1..18: mol_type = other DNA
gggtagggcgggttggga

SEQ ID NO: 2360 - RNA, 12 nt, synthetic construct
  misc_feature 1..12: note = Synthetic
  misc_feature 1: note = Biotin Tag /5Biosg/
  misc_feature 12: note = Iowa Black Quencher /3IAbRQSp/
  source 1..12: mol_type = other RNA
tctcgtacgttc

SEQ ID NO: 2361 - RNA, 24 nt, synthetic construct
  misc_feature 1..24: note = Synthetic
  misc_feature 1: note = Biotin Tag /5Biosg/
  misc_feature 24: note = Iowa Black Quencher /3IAbRQSp/
  source 1..24: mol_type = other RNA
tctcgtacgttctctcgtacgttc
